(19) United States
(12) Patent Application Publication
(10) Pub. No.: US 2006/0014165 A1
(43) Pub. Date: Jan. 19, 2006

(54) Methods of diagnosis and treatment for asthma and other respiratory diseases based on haplotype association

(75) Inventors: Hakon Hakonarson, Reykjavik (IS); Mark E. Gurney, East Grand Rapids, MI (US); Eva Halapi, Reykjavik (IS)

Correspondence Address: HAMILTON, BROOK, SMITH & REYNOLDS, P.C., 530 VIRGINIA ROAD, P.O. BOX 9133, CONCORD, MA, 01742-9133, US

(73) Assignee: deCODE genetics ehf., Reykjavik (IS)

(21) Appl. No.: 11/043,752

(22) Filed: Jan. 26, 2005

Related U.S. Application Data
(63) Continuation-in-part of application No. PCT/US04/22446, filed on Jul. 14, 2004.
(60) Provisional application No. 60/487,072, filed on Jul. 14, 2003.
(60) Provisional application No. 60/559,611, filed on Apr. 5, 2004.

(51) Int. Cl. C12Q 1/68; A61K 31/47

(52) U.S. Cl. 435/6; 514/313

(57) ABSTRACT

Methods for diagnosis of asthma or a susceptibility to asthma based on detection of at-risk haplotypes associated with MAP3K9 are disclosed. Also methods for treatment of asthma or a susceptibility to asthma based on detection of at-risk haplotypes associated with MAP3K9 are disclosed. In particular, pathway targeting for treating individuals who are at-risk of developing asmtha are described. In certain aspects, MLK1 inhibitors are used in treatment methods.

### RELATED APPLICATIONS

[0001] This application is a continuation-in-part of International Application No. PCT/US2004/022446, which designated the United States and was filed on Jul. 14, 2004 and claims the benefit of U.S. Provisional Application No. 60/487,072, filed on Jul. 14, 2003 and U.S. Provisional Application No. 60/559,611, filed on Apr. 5, 2004. The entire teachings of the above applications are incorporated herein by reference.

### BACKGROUND OF INVENTION

[0002] Bronchial asthma [Morbidity Number (MIM) 600807], the most common chronic disease affecting children and young adults, is a complex genetic disorder with several overlapping phenotypes (Cookson and Moffatt 2000; Weiss 2001). There is strong evidence for a genetic component in asthma (Bleecker et al., 1997; Kauffmann et al., 2002). Multiple environmental factors are also known to modulate the clinical expression of asthma as well as the asthma-associated phenotypes: bronchial hyperresponsiveness, atopy and elevated IgE (Koppelman et al., 1999; Cookson 1999; Holloway et al., 1999). It is a commonly held view that asthma is caused by multiple interacting genes some having a protective effect and others contributing to the disease pathogenesis, with each gene having its own tendency to be influenced by the environment (Koppelman et al. and Postma, 1999; Cookson, 1999; Holloway et al., 1999). Thus, the complex nature of the asthma phenotype, together with substantial locus heterogeneity and environmental influence, has made it difficult to uncover genetic factors that underlie asthma.

[0003] Numerous loci and candidate genes have been reported showing linkage and association to asthma and atopy. While some studies reporting these observations are compelling, no asthma gene conferring high risk has been mapped such that it meets stringent criteria for genome-wide significance.

### SUMMARY OF THE INVENTION

[0004] As described herein, a gene on chromosome 14q24 has been identified that plays a major role i][asthma. The gene MAP3K9 (the asthma gene) encodes a kinase that is part of the Mixed Lineage Kinase (MLK) family. The protein encoded by the MAP3K9 gene is designated as MAP3K9 (herein) or more commonly as MLK-1. This locus has been designated asthma locus one (hereinafter referred to as “AS 1”). The present invention relates to methods of treatment using inhibitors to the asthma gene products.

[0005] The invention pertains to methods of treatment (prophylactic and/or therapeutic) for certain diseases and conditions (e.g., asthma and other respiratory diseases) associated with MAP3K9 or with other members of the JNK pathway, for example, members of the MLK family kinases (e.g., MLK1, MLK2, MLK3(SPRK, PTK1), MLK4, LZK, DLK (ZPK, MUK) and MLK6), in particular, MLK1; and/or with other members of the JNK pathway (as shown in FIG. 1), receptors and/or binding agents of the enzymes; the transcription factor AP-1 and its individual components, c-jun and v-fos, and receptors for the MLK family kinases. The methods include the following: methods of treatment for asthma or susceptibility to asthma; and methods of treatment for respiratory diseases associated with MAP3K9 or with other members of the MLK family.

[0006] In the methods of the invention, a MLK kinase family inhibitor is administered to an individual in a therapeutically effective amount. The MLK kinase family inhibitor can be an agent that inhibits or antagonizes a member of the JKN pathway, in particular the MLK family kinase pathway (e.g., MLK1, MLK2, MLK3) that are members of a subset of the JNK pathway, and the transcription factor AP-1 and its individual components, c-jun and v-fos. For example, the MLK kinase family inhibitor synthesis inhibitor can be an agent that inhibits or antagonizes MAP3K9 polypeptide (MLK1) activity (e.g., a MAP3K9 inhibitor, for example, a compound (1), CEP-1347, or a compound of Formula IV) and/or MAP3K9 nucleic acid expression, as described herein (e.g., a MAP3K9 nucleic acid antagonist). In one aspect, the agent alters activity and/or nucleic acid expression of MAP3K9. In another aspect, the agents used in the methods are represented by formula I and further described in Tables A and B, and their optically pure stereoisomers, mixtures of stereoisomers, salts, chemical derivatives, and analogues. In other aspects, the agent used in the methods is CEP-1347 as shown in Formula III, its optically pure stereoisomers, mixtures of stereoisomers, salts, chemical derivatives, and analogues or a compound of Structural Formula IV, its optically pure stereoisomers, mixtures of stereoisomers, salts, chemical derivatives, and analogues. In another aspect, the agent alters metabolism or inhibits activity of an MLK1 protein (e.g., MLK1 kinase), or an MLK kinase family member.

[0007] In certain aspects of the invention, the individual is an individual who has at least one risk factor, such as an at-risk haplotype for asthma; an at-risk haplotype in the MAP3K9 gene; a polymorphism in a MAP3K9 nucleic acid; dysregulation of MAP3K9 mRNA expression; dysregulation of a MAP3K9 mRNA isoform; increased MLK1 protein expression; increased MLK1 biochemical activity; and increased MKL1 protein isoform expression.

[0008] The invention further pertains to methods of assessing response to treatment with a MLK kinase family protein, for example MLK1, by assessing a level of a MLK kinase family protein in the individual before treatment, and comparing the level to a level of the MLK kinase family protein assessed during or after treatment. A level that is significantly lower during or after treatment, than before treatment, is indicative of efficacy of the treatment with the MLK kinase family protein. The level of the MLK kinase family protein can be measured using a biochemical assay of enzyme activity, or using methods that allow direct quantitation of the amount of MLK kinase protein, e.g., by enzyme-linked immunosorbent assay (EIA). The invention additionally pertains to methods of assessing response to treatment with a MLK kinase family protein, by stimulating production of a MLK kinase family protein or a MLK kinase family protein in a first test sample from the individual (e.g., a sample comprising leukocytes) before treatment, and comparing the level of the MLK kinase family protein with a level of production of the MLK kinase family protein in a second test sample from the individual, during or after treatment. A level of production of the MLK kinase family protein or MLK kinase family protein in the second test sample that is significantly lower than the level in the first test sample is indicative of efficacy of the treatment. Similarly, the invention encompasses methods of assessing response to treatment with a MLK kinase family inhibitor, by assessing a level of an inflammatory marker (e.g., IL-2 and TNFα) in the individual before treatment, and during or after treatment. A level of the inflammatory protein marker during or after treatment, that is significantly lower than the level of inflammatory marker before treatment, is indicative of efficacy of the treatment. The first sample can also be a “control level” of the MLK kinase family protein that has been determined by large sampling of individual without any incidence of asthma.

[0009] The present invention also relates to isolated nucleic acid molecules comprising the asthma gene located within AS1 locus. It has also been discovered that particular combinations of genetic markers (“haplotypes”), are present at a higher than expected frequency in patients with phenotypes associated with asthma and a susceptibility to asthma. The markers that are included in the haplotypes described herein are associated with the genomic region that directs expression of MAP3K9 kinase.

[0010] In one embodiment, the invention is directed to a method of diagnosing asthma or a susceptibility to asthma in an individual, comprising detecting the presence or absence of an at-risk haplotype, comprising a haplotype selected from the group consisting of: haplotype 1, haplotype 2, haplotype 3, haplotype 4, haplotype 5, haplotype 6, haplotype 7, haplotype 8, haplotype 9, and haplotype 10 and combinations thereof, wherein the presence of the haplotype is indicative of asthma or a susceptibility to asthma. In a particular embodiment, the invention is directed to assaying for the presence of a first nucleic acid molecule in a sample, comprising contacting said sample with a second nucleic acid molecule comprising the one or more haplotypes described herein. In one embodiment, determining the presence or absence of the haplotype comprises enzymatic amplification of nucleic acid from the individual. In a particular embodiment, determining the presence or absence of the haplotype further comprises electrophoretic analysis. For example, in one embodiment, determining the presence or absence of the haplotype comprises restriction fragment length polymorphism analysis. In another embodiment, determining the presence or absence of the haplotype comprises sequence analysis.

[0011] In a particular embodiment, determining the presence or absence of the haplotype further comprises electrophoretic analysis. For example, in one embodiment, determining the presence or absence of the haplotype comprises restriction fragment length polymorphism analysis. In another embodiment, determining the presence or absence of the haplotype comprises sequence analysis.

[0012] In another embodiment, the invention is directed to a method of diagnosing asthma or a susceptibility to asthma in an individual, comprising detecting the presence or absence of an at-risk haplotype comprising haplotype 10 (shown in Table 1), wherein the presence of the haplotype is indicative of asthma or a susceptibility to asthma. In a particular embodiment, determining the presence or absence of the haplotype comprises enzymatic amplification of nucleic acid from the individual. In a particular embodiment, determining the presence or absence of the haplotype further comprises electrophoretic analysis. For example, in one embodiment, determining the presence or absence of the haplotype comprises restriction fragment length polymorphism analysis. In another embodiment, determining the presence or absence of the haplotype comprises sequence analysis.

[0013] In another embodiment, the invention is directed to a kit for assaying a sample for the presence of a haplotype associated with asthma, wherein the haplotype comprises two or more specific alleles, and wherein the kit comprises one or more nucleic acids capable of detecting the presence or absence of two or more of the specific alleles, thereby indicating the presence or absence of the haplotype in the sample. In a particular embodiment, the nucleic acid comprises a contiguous nucleotide sequence that is completely complementary to a region comprising specific allele of the haplotype.

[0014] In another embodiment, the invention is directed to a reagent kit for assaying a sample for the presence of a haplotype associated with asthma, wherein the haplotype comprises two or more specific alleles, comprising in separate containers: a) one or more labeled nucleic acids capable of detecting one or more specific alleles of the haplotype; and b) reagents for detection of said label. In a particular embodiment, the labeled nucleic acid comprises a contiguous nucleotide sequence that is completely complementary to a region comprising specific allele of the haplotype.

[0015] In yet another embodiment, the invention is directed to a reagent kit for assaying a sample for the presence of a haplotype associated with asthma, wherein the haplotype comprises two or more specific alleles, wherein the kit comprises one or more nucleic acids comprising a nucleotide sequence that is at least partially complementary to a part of the nucleotide sequence of the MAP3K9 gene, and wherein the nucleic acid is capable of acting as a primer for a primer extension reaction capable of detecting one or more of the specific alleles of the haplotype.

[0016] In another embodiment, the invention is directed to a method for the diagnosis and identification of susceptibility to asthma in an individual, comprising: screening in a sample from the individual to be diagnosed for an at-risk haplotype associated with MAP3K9 that is more frequently present in an individual susceptible to asthma compared to an individual who is not susceptible to asthma wherein the at-risk haplotype increases the risk significantly. In a particular embodiment, the significant increase is at least about 20%. In another embodiment, the significant increase is identified as an odds ratio of at least about 1.2.

[0017] The invention further pertains to a method of diagnosing asthma or a susceptibility to asthma in an individual, comprising detecting in a sample from the individual to be diagnosed the presence or absence of at least one marker of an at-risk haplotype associated with the MAP3K9 gene selected from the group consisting of: DG14S205, DG14S428, D14S1002, DG14S4399, DG14S404, D14S251, DG14S1300, DG14S266, DG14DG14S448, DG14S1879, DG14S417, SG14S89, SG14S152, SG14S174 and SG14S184, wherein the presence of one or more markers is indicative of asthma or a susceptibility to asthma.

[0018] In another embodiment, the invention is directed to a method for diagnosing a susceptibility to asthma in an individual, comprising determining in a sample from the individual to be diagnosed the presence or absence in the individual of a haplotype, comprising two or more alleles selected from the group consisting of one or a combination of the markers that comprise the haplotypes set forth in Table 1, wherein the presence of the haplotype is indicative of susceptibility to asthma. In a particular embodiment, determining the presence or absence of the haplotype further comprises electrophoretic analysis. For example, in one embodiment, determining the presence or absence of the haplotype comprises restriction fragment length polymorphism analysis. In another embodiment, determining the presence or absence of the haplotype comprises sequence analysis.

[0019] In yet another embodiment, the invention is directed to a method for diagnosing a susceptibility to asthma in an individual, comprising obtaining a nucleic acid sample from the individual; and analyzing the nucleic acid sample for the presence or absence of a haplotype comprising two or more alleles selected from the group consisting of one or a combination of the markers that comprise the haplotypes set forth in Table 1, wherein the presence of the haplotype is indicative of susceptibility to asthma.

[0020] The present invention relates to isolated nucleic acid molecules comprising the asthma gene located within AS1 locus. In one embodiment, the isolated nucleic acid molecule comprises a nucleotide sequence of SEQ ID NO: 1 or the complement thereof; wherein the nucleic acid molecule can optionally comprise one ore more of the SNPs set forth in the Examples. The invention further relates to a nucleic acid molecule that hybridizes under high stringency conditions to a nucleotide sequence of SEQ ID NO: 1 and the complement thereof. The invention additionally relates to isolated nucleic acid molecules (e.g., cDNA molecules) encoding a MAP3K9 polypeptide (e.g., encoding a polypeptide of SEQ ID NO: 2).

[0021] Also contemplated by the invention is a method of assaying for the presence of a first nucleic acid molecule in a sample, comprising contacting said sample with a second nucleic acid molecule, where the second nucleic acid molecule comprises at least one (or more) nucleic acid sequence(s) selected from the sequences described herein, wherein the nucleic acid sequence hybridizes to the first nucleic acid under high stringency conditions. In certain embodiments, the second nucleic acid molecule contains one or more polymorphism(s), described herein.

[0022] The invention also relates to a vector comprising an isolated nucleic acid molecule of the invention, optionally including one or more of the polymorphisms described herein, operably linked to a regulatory sequence, as well as to a recombinant host cell comprising the vector. The invention also provides a method for producing a polypeptide encoded by an isolated nucleic acid molecule having a polymorphism, comprising culturing the recombinant host cell under conditions suitable for expression of the nucleic acid molecule.

[0023] Also contemplated by the invention is a method of assaying for the presence of a polypeptide encoded by an isolated nucleic acid molecule of the invention in a sample, the method comprising contacting the sample with an antibody that specifically binds to the encoded polypeptide.

[0024] The invention further pertains to a method of identifying an agent that alters expression of a MAP3K9 nucleic acid, comprising: contacting a solution containing a nucleic acid comprising the promoter region of the MAP3K9 gene operably linked to a reporter gene, with an agent to be tested; assessing the level of expression of the reporter gene in the presence of the agent; and comparing the level of expression of the reporter gene in the presence of the agent with a level of expression of the reporter gene in the absence of the agent; wherein if the level of expression of the reporter gene in the presence of the agent differs, by an amount that is statistically significant, from the level of expression in the absence of the agent, then the agent is an agent that alters expression of the MAP3K9 gene or nucleic acid. An agent identified by this method is also contemplated.

[0025] The invention additionally comprises a method of identifying an agent that alters expression of a MAP3K9 nucleic acid, comprising contacting a solution containing a nucleic acid of the invention or a derivative or fragment thereof, with an agent to be tested; comparing expression of the nucleic acid, derivative or fragment in the presence of the agent with expression of the nucleic acid, derivative or fragment in the absence of the agent; wherein if expression of the nucleic acid, derivative or fragment in the presence of the agent differs, by an amount that is statistically significant, from the expression in the absence of the agent, then the agent is an agent that alters expression of the MAP3K9 nucleic acid. In certain embodiments, the expression of the nucleic acid, derivative or fragment in the presence of the agent comprises expression of one or more splicing variants(s) that differ in kind or in quantity from the expression of one or more splicing variant(s) the absence of the agent. Agents identified by this method are also contemplated.

[0026] Representative agents that alter expression of a MAP3K9 nucleic acid contemplated by the invention include, for example, antisense nucleic acids to a MAP3K9 gene or nucleic acid; a MAP3K9 gene or nucleic acid; a MAP3K9 polypeptide; a MAP3K9 gene or nucleic acid receptor, or other receptor; a MAP3K9 binding agent; a peptidomimetic; a fusion protein; a prodrug thereof; an antibody; and a ribozyme. A method of altering expression of a MAP3K9 nucleic acid, comprising contacting a cell containing a nucleic acid with such an agent is also contemplated.

[0027] The invention further pertains to a method of identifying a polypeptide which interacts with a MAP3K9 polypeptide (e.g., a MAP3K9 polypeptide encoded by a nucleic acid of the invention, such as a nucleic acid comprising one or more polymorphism(s) described herein), comprising employing a yeast two-hybrid system using a first vector which comprises a nucleic acid encoding a DNA binding domain and a MAP3K9 polypeptide, splicing variant, or a fragment or derivative thereof, and a second vector which comprises a nucleic acid encoding a transcription activation domain and a nucleic acid encoding a test polypeptide. If transcriptional activation occurs in the yeast two-hybrid system, the test polypeptide is a polypeptide which interacts with a MAP3K9 polypeptide.

[0028] In certain methods of the invention, an asthma therapeutic agent is used. The asthma therapeutic agent can be an agent that alters (e.g., enhances or inhibits) MAP3K9 polypeptide activity and/or MAP3K9 nucleic acid expression, as described herein (e.g., a nucleic acid agonist or antagonist).

[0029] Asthma therapeutic agents can alter polypeptide activity or nucleic acid expression of a MAP3K9 nucleic acid by a variety of means, such as, for example, by providing additional polypeptide or upregulating the transcription or translation of the nucleic acid encoding the MAP3K9 polypeptide; by altering posttranslational processing of the MAP3K9 polypeptide; by altering transcription of splicing variants; or by interfering with polypeptide activity (e.g., by binding to the MAP3K9 polypeptide, or by binding to another polypeptide that interacts with MAP3K9, such as a MAP3K9 binding agent as described herein), by altering (e.g., downregulating) the expression, transcription or translation of a nucleic acid encoding MAP3K9; or by altering interaction among MAP3K9 and a MAP3K9 binding agent.

[0030] In a further embodiment, the invention relates to asthma therapeutic agent, such as an agent selected from the group consisting of: a MAP3K9 nucleic acid or fragment or derivative thereof; a polypeptide encoded by a MAP3K9 nucleic acid (e.g., encoded by a MAP3K9 nucleic acid having one or more polymorphism(s) such as those described herein); a MAP3K9 receptor; a MAP3K9 binding agent; a peptidomimetic; a fusion protein; a prodrug; an antibody; an agent that alters MAP3K9 gene or nucleic acid expression; an agent that alters activity of a polypeptide encoded by a MAP3K9 gene or nucleic acid; an agent that alters posttranscriptional processing of a polypeptide encoded by a MAP3K9 gene or nucleic acid; an agent that alters interaction of a MAP3K9 polypeptide with a MAP3K9 binding agent or receptor; an agent that alters transcription of splicing variants encoded by a MAP3K9 gene or nucleic acid; and ribozymes. The invention also relates to pharmaceutical compositions comprising at least one asthma therapeutic agent as described herein.

[0031] The present invention pertains to methods of diagnosing a susceptibility to asthma in an individual, comprising detecting a polymorphism in a MAP3K9 nucleic acid, wherein the presence of the polymorphism in the nucleic acid is indicative of a susceptibility to asthma. The invention additionally pertains to methods of diagnosing asthma in an individual, comprising detecting a polymorphism in a MAP3K9 nucleic acid, wherein the presence of the polymorphism in the nucleic acid is indicative of asthma. In one embodiment, in diagnosing asthma or susceptibility to asthma by detecting the presence of a polymorphism in a MAP3K9 nucleic acid, the presence of the polymorphism in the MAP3K9 nucleic acid can be indicated, for example, by the presence of one or more of the polymorphisms indicated in the Example Section.

[0032] In other embodiments, the invention relates to methods of diagnosing a susceptibility to asthma in an individual, comprising detecting an alteration in the expression or composition of a polypeptide encoded by a MAP3K9 nucleic acid in a test sample, in comparison with the expression or composition of a polypeptide encoded by a MAP3K9 nucleic acid in a control sample, wherein the presence of an alteration in expression or composition of the polypeptide in the test sample is indicative of a susceptibility to asthma. The invention additionally relates to a method of diagnosing asthma in an individual, comprising detecting an alteration in the expression or composition of a polypeptide encoded by a MAP3K9 nucleic acid in a test sample, in comparison with the expression or composition of a polypeptide encoded by MAP3K9 nucleic acid in a control sample, wherein the presence of an alteration in expression or composition of the polypeptide in the test sample is indicative of asthma.

[0033] The invention also pertains to a method of treating a disease or condition associated with a MAP3K9 polypeptide (e.g., asthma) in an individual, comprising administering a asthma therapeutic agent to the individual, in a therapeutically effective amount. In certain embodiments, the asthma therapeutic agent is a MAP3K9 agonist; in other embodiments, the asthma therapeutic agent is a MAP3K9 antagonist.

[0034] A transgenic animal comprising a nucleic acid selected from the group consisting of: an exogenous MAP3K9 gene or nucleic acid and a nucleic acid encoding a MAP3K9 polypeptide, is further contemplated by the invention.

[0035] In yet another embodiment, the invention relates to a method for assaying a sample for the presence of a MAP3K9 nucleic acid, comprising contacting the sample with a nucleic acid comprising a contiguous nucleotide sequence which is at least partially complementary to a part of the sequence of said MAP3K9 nucleic acid under conditions appropriate for hybridization, and assessing whether hybridization has occurred between a MAP3K9 nucleic acid and said nucleic acid comprising a contiguous nucleotide sequence which is at least partially complementary to a part of the sequence of said MAP3K9 nucleic acid; wherein if hybridization has occurred, a MAP3K9 nucleic acid is present in sample. In certain embodiments, the contiguous nucleotide sequence is completely complementary to a part of the sequence of said MAP3K9 nucleic acid. If desired, amplification of at least part of said MAP3K9 nucleic acid can be performed.

[0036] In certain other embodiments, the contiguous nucleotide sequence is 100 or fewer nucleotides in length and is either at least 80% identical to a contiguous sequence of nucleotides, at least 80% identical to the complement of a contiguous sequence of nucleotides; or capable of selectively hybridizing to said MAP3K9 nucleic acid.

[0037] In other embodiments, the invention relates to a reagent for assaying a sample for the presence of a MAP3K9 gene or nucleic acid, the reagent comprising a contiguous nucleotide sequence which is at least partially complementary to a part of the nucleic acid sequence of said MAP3K9 gene or nucleic acid; or comprising a contiguous nucleotide sequence which is completely complementary to a part of the nucleic acid sequence of said MAP3K9 gene or nucleic acid. Also contemplated by the invention is a reagent kit, e.g., for assaying a sample for the presence of a MAP3K9 nucleic acid, comprising (e.g., in separate containers) one or more labeled nucleic acids comprising a contiguous nucleotide sequence which is at least partially complementary to a part of the nucleic acid sequence of the MAP3K9 nucleic acid, and reagents for detection of said label. In certain embodiments, the labeled nucleic acid comprises a contiguous nucleotide sequence that is completely complementary to a part of the nucleotide sequence of said MAP3K9 gene or nucleic acid. In other embodiments, the labeled nucleic acid can comprise a contiguous nucleotide sequence which is at least partially complementary to a part of the nucleotide sequence of said MAP3K9 gene or nucleic acid, and which is capable of acting as a primer for said MAP3K9 nucleic acid when maintained under conditions for primer extension.

[0038] The invention also provides for the use of a nucleic acid which is 100 or fewer nucleotides in length and which is either: a) at least 80% identical to a contiguous sequence of nucleotides; b) at least 80% identical to the complement of a contiguous sequence of nucleotides; or c) capable of selectively hybridizing to said MAP3K9 nucleic acid, for assaying a sample for the presence of a MAP3K9 nucleic acid.

[0039] In yet another embodiment, the use of a first nucleic acid which is 100 or fewer nucleotides in length and which is either: a) at least 80% identical to a contiguous sequence of nucleotides; b) at least 80% identical to the complement of a contiguous sequence of nucleotides; or c) capable of selectively hybridizing to said MAP3K9 nucleic acid; for assaying a sample for the presence of a MAP3K9 gene or nucleic acid that has at least one nucleotide difference from the first nucleic acid (e.g., a SNP as set forth herein), such as for diagnosing a susceptibility to a disease or condition associated with a MAP3K9.

[0040] The invention also pertains to the use of a MLK family kinase inhibitor for the manufacture of a medicament for treatment for asthma in an individual, wherein the individual has at least one risk factor selected from the group consisting of: an at-risk haplotype for asthma; an at-risk haplotype in the MAP3K9 gene; a polymorphism in a MAP3K9 nucleic acid; dysregulation of MAP3K9 mRNA expression, dysregulation of a MAP3K9 mRNA isoform; increased MLK1 protein expression; increased MLK1 biochemical activity; and increased MKL1 protein isoform expression. In certain embodiments, the MLK family kinase inhibitor is a MLK1 inhibitor, for example CEP-1347 (Formula III) and its optically pure stereoisomers, mixtures of stereoisomers and salts or an indolocarbazole derivative and its optically pure stereoisomers, mixtures of stereoisomers and salts.

[0041] Also contemplated by the present invention is use of a first nucleic acid molecule for diagnosing asthma or a susceptibility to asthma in a sample from an individual to be diagnosed, comprising detecting in the sample the presence or absence of a second nucleic acid molecule of at least one marker of an at-risk haplotype associated with the MAP3K9 gene selected from the group consisting of: haplotype 1, 2, 3, 4, 5, 6, 7, 8, 9 and 10 of Table 1 and combinations thereof by contact with the first nucleic acid, wherein the presence of one or more markers is indicative of asthma or a susceptibility to asthma. The presence or absence of the marker can be accomplished by enzymatic amplification of nucleic acids, electrophoretic analysis, restriction fragment length polymorphism analysis or sequence analysis.

### BRIEF DESCRIPTION OF THE DRAWINGS

[0042] The foregoing and other objects, features and advantages of the invention will be apparent from the following more particular description of preferred aspects of the invention, as illustrated in the accompanying drawings.

[0043] The patent or application file contains at least one drawing executed in color. Copies of this patent or patent application publication with color drawings will be provided by the Office upon request and payment of the necessary fee.

[0044] FIG. 1 is an illustration of the JNK signaling cascade. 3

[0045] FIG. 2 shows examples of asthma pedigrees used in the linkage analysis. Unaffected siblings of patients are not shown and sex indicators have been shuffled for some individuals in the top two generations to protect privacy. The darkened squares and circles represent affected men and women, respectively. The slashed symbols represent deceased individuals.

[0046] FIG. 3 shows multipoint allele-sharing lod score of chromosome 14. A framework genome scan is shown by a dotted line. A fine mapping lod score of 4.00 was detected within the peak region after adding 34 microsatellite markers to obtain a marker density of less than 0.2 cM, using deCODE's high-density genetic map to determine genetic distances. The multipoint lod score is on the y-axis and centimorgan distance from the p-terminus of the chromosome is on the x-axis.

[0047] FIG. 4 shows mean age, gender, smoking history, % patients with positive skin tests, mean total IgE level, asthma severity level and lung function values expressed as % predicted forced expiratory volume in one second (% FEV1), forced expiratory volume in one second/forced vital capacity ratio (FEV1/FVC) and % of patients requiring ≦2.0 mg/ml and ≦8 mg/ml of methacholine, respectively, to produce 20% drop in FEVL (PC₂₀) for the asthma study population.

[0048] FIG. 5 shows a map of the MAP3K9 gene with SNPs and microsatellites.

[0049] FIGS. 6.A and 6.B show the linkage disequilibrium (LD) plot for chr 14q24.2-3 region with all markers present. Mapping of the linkage disequilibrium blocks using multiple microsatellite and SNP markers (x- and y-axis), covering the one lod drop on chromosome 14q24.2-3 (FIG. 6.A) and the 3 LD blocks (FIG. 6.B) that show the strongest association to asthma and include the MAP3K9gene. The d-dimer plot is shown above the transverse line (i.e., LD of any two markers next to each other) and the corresponding p-values are shown below the line. The significance of the d-dimer and the p values is reflected in the difference in black and white intensities (vertical axis to the right). FIG. 6.B shows a narrowly focused section of the linkage disequilibrium plot of FIG. 6.A in the region where the markers comprising the haplotypes reside.

[0050] FIGS. 7A to 7T show the nucleic acid sequence for MAP3K9 with coding regions (SEQ ID NO: 1). The upper case letters indicate the coding regions (exons).

[0051] FIG. 8 is the amino acid sequence of MAP3K9 (SEQ ID NO: 2).

[0052] FIG. 9 is a graph showing the MAP3K9 expression in asthma airway tissue using RT-PCR. OLD: Surgical resection of non-cancer tissue from individuals; OLD-1 and OLD-2, with obstructive lung disease. CO: Control Lung (surgical resection of non-cancer tissue from 2 individuals; CO-1 and CO-2). The results show a markedly enhance expression of Map3K9 expression in asthma compared to control airway tissue.

[0053] FIG. 10 is a graph showing MAP3K9 expression in PBM cells from asthma patients vs. control subjects. The results indicate a significant enhanced expression in PBM cells from asthma patients for variant b comparable to lung data.

[0054] FIGS. 11A-11O shows the mRNA and amino acid sequences for the splice variants a-e.

[0055] FIGS. 12A to 12Z43 are a table of microsatellite and SNP markers with the forward and reverse primer sequences. Also provided are the amplimer sequences and the nucleic acid start and end positions.

### DETAILED DESCRIPTION OF THE INVENTION

[0056] Extensive genealogical information for a population with population-based lists of patients has been combined with powerful genome sharing methods to map the first major locus in asthma with genome-wide significance. A genome-wide scan on patients, related within 6 meiotic events, diagnosed with asthma and their unaffected relatives has been completed. Locus AS1 on chromosome 14q24 has been identified through linkage studies to be associated with asthma. This locus does not correspond to known susceptibility loci for asthma, and represents the first mapping of a gene for asthma on chromosome 14q24. Until now there have been no known linkage studies of asthma in humans showing connection to this region of the chromosome. Based on the linkage studies conducted, Applicants have discovered a direct relationship between the genome wide significant (GWS) AS1 locus and asthma.

[0057] Linkage and association studies have identified a gene MAP3K9, that is located on 14q24.2-3 and is in the middle of a region where there is a significant 4-marker haplotype that overlays the MAP3K9 gene and is present in up to 12.8% of patients and 5% in controls (Relative Risk 2.81). This haplotype is the most common of ten overlapping microsatellite haplotypes that extend over a 170 kb. After typing additional SNPs, a 46 kb long haplotype was uncovered consisting of four SNPs, extending over exons 1 and 2 and the promoter region of MAP3K9. This haplotype is found in 15.7% of patients vs 6.8% of controls and confers a relative risk of 2.56. See Tables 1 and 2 in the Examples Section. All the patients studied have physician-diagnosed asthma (⅔ of who also have atopy as determined by positive skin tests and/or elevated IgE). All ten genetic marker haplotypes are shown in Table 1 and their p-values (p-val) and relative risk ratios (r) are shown in Table 2. Initially the MAP3K9 gene was isolated from a human epithelial tumor cell line. Expression of MAP3K9 has been found in lung tumor cell and different cell lines from the immune system as well as in smooth muscle cells.

[0058] MAP3K9 is a part of Mitogen-Activated Protein Kinase (MAPK) signal transduction pathways, which are among the most widespread mechanisms of eukaryotic cell regulation. In all eukaryotic cells there are multiple MAPK pathways, each reacting to different stimuli. The regulation of MAP3Ks represents an entry point into the MAPK pathways and is therefore complex.

[0059] Several kinases have been targeted therapeutically in various diseases and their function shown to be effectively modulated using small molecules. An example is the development of new small molecule inhibitors of p38 kinase that are being considered a potential new therapy for asthma. The MAP3K9 kinase is a gene that overlays the center of a haplotype that is almost three times more common in patients than in controls (i.e., RR 2.8); no asthma gene has been isolated today that carries a higher risk than this gene. The gene is in the pathway of cell signaling that involves mitogenic and second messenger activities (including IP3 regulation). Thus, this gene is a strong therapeutic target candidate for the development of new small molecule therapy for patients with asthma.

[0060] MAP3K9 is a member of the Mixed Lineage Kinase (MLK) family. The kinase domain of MLK family kinases has amino acid sequence similarity to both the tyrosine-specific and the serine/threonine-specific kinase classes although MAP3K9 is a serine/threonine kinase. Known serine/threonine phosphorylation substrates of MLK family members are the kinases MKK7 or MKK4. MLK family kinases, MKK7 and MKK4 are all known members of the JNK signalling cascade (see FIG. 1). Within the JNK signalling cascade there are three tiers of kinases linking stimuli such as cellular stress, injury or cytokines through the JNKs to transcriptional regulation via phosphorylation of c-Jun and related transcription factors (JunB & JunD).

[0061] The JNKs and a substrate of the JNKs, c-Jun have been implicated in the positive regulatory control of cell death or apoptosis. This could relate to asthma through two fundamental processes: 1) dysregulation of immune function through inappropriate cell death or lack thereof; and 2) inappropriate vascular and airway smooth muscle cell hyperplasia and consequent airway thickening increasing the risk or severity of asthma. While the MAP3K9 gene itself has never been associated with asthma, the JNK pathway has been implicated in the following processes that relate to various aspects of asthma:
[0062] 1. Nitric oxide-induced AP-1 activation in human bronchial epithelial cells T-helper type 2 cell differentiation and production of the pro-inflammatory cytokines IFN-gamma and TGF-beta;
[0063] 2. Allergen-induced airway inflammation in mice (this is reduced in Jun-B deficient mice); and
[0064] 3. LPS induced IL-10 and IL-13 production by mast cells relating to airway inflammation in asthma.

[0065] The MLK-1 & the JNK pathway have been shown to regulate TNFα & IL-1b secretion, both of which are important cytokines in asthma. Moreover, the TH2-type cytokinese, IL10, IL13 and IL5, all of which are effective modulators of airway smooth muscle (ASM) contractility and relaxation, exert their effects on airway hyperresponsiveness, at least in part, through the induced expression and autocrine action of IL1beta (Hakonarson and Grunstein, Respir Physiol Neurobiol. September 16; 137(2-3):263-76 (2003); Nakae S et al., Int Immunol. April ;15(4):483-90 (2003)). Apart from regulation of IL-1b and TNFα secretion, the MLK-1 signaling pathway, through JNK and c-jun, is involved in the regulation of various other pro-inflammatory cytokines, including IL6, IL8 as well as various chemokines and TH1-type cytokines (IL2, IL12, IFNg) through its regulation of AP-1 transcription factor activity. IL-1b and TNFα have been shown to be critically involved in the local regulation of airway inflammation (Wuyts et al., Respir Med. July;97(7):811-7 (2003)). In addition, IL1b and to a lesser extend, TNFα are key regulators of ASM contractility and relaxation, two of the cardinal phenotypic features of asthma (Hakonarson et al. Mechanism of cytokine-induced modulation of beta-adrenoceptor responsiveness in airway smooth muscle. (Hakonarson et al., J Clin Invest. June 1;97(11):2593-600 (1996); Autocrine role of interleukin 1beta in altered responsiveness of atopic asthmatic sensitized airway smooth muscle. (J Clin Invest. January 1 ;99(1): 117-24 (1997)). Both IL1b and TNFα are potent mitogens in ASM and mucus glands (Page et al., Front Biosci. 5: 258-267, (2000); Stylianou et al., Int. J. Biochem Cell Biol. October;30(10):1075-9 (1998)) and thereby account for, at least in part, the increased ASM muscle mass and mucus hypersecretion, the other principal features of the asthma phenotype. Therefore, an inhibitor of MLK-1 such as the compound, CEP-1347, that has been shown to potently inhibit the release of TNF & IL-1 secretion in various cellular systems, would be anticipated to block asthma.

[0066] Chemical inhibitors of MLK family kinases have been described (Maroney et al., JBC, 276(27): 25302-25308 (2001)). For example, CEP-1347 (formula III) directly inhibits MLK family kinases including MLK1, MLK2 and MLK3. Inhibitory potency defined as the concentration of CEP-1347 needed to inhibit MLK kinase activity in a standardized biochemical assay is 38 nM±17 nM, 51 nM±9 nM and 23 nM±0.1 nM for MLK1, MLK2 and MLK3 respectively. CEP-1347 also effectively inhibits the activity of MLK kinases within intact cells with inhibitory potencies of 61 nM±11 nM, 82 nM±10 nM and 39 nM±3 nM for MLK1, MLK2 and MLK3, respectively. The kinetics of CEP-1347 inhibition of MLK kinases is consistent with a mode of action competitive with the binding of adenosine triphosphate in the MLK active site.

[0067] In addition, CEP-1347 has been shown to inhibit the production of TNFα and IL-1β by cultured cells under standard in vitro pharmacological testing procedures (see WO 97/49406). Also in animals, CEP-1347 reduces production of TNFα and IL-1β by mice after challenge with lipopolysaccharide (LPS) and provides protection from LPS-induced death. Since IL1b and TNFα are key regulators of ASM contractility (i.e., bronchial hyperresponsiveness) and relaxation, two of the cardinal phenotypic features of asthma and are the principal cytokines responsible for ASM and epithelial gland hypertrophy and hyperplacia as well as having profound autocrine effects that promote local airway inflammation, inhibition of IL-1b and TNFα would be anticipated to benefit asthma. Thus, CEP-1347 possesses pharmaceutic properties indicative of its potential benefit for the treatment of human diseases including asthma resulting from MAP3K9 gene dysregulation and consequent dysregulated production of MLK1.

Target At-Risk Populations

[0068] Target populations for the methods described herein, include individuals having an at-risk factor in a MAP3K9 gene haplotype or a polymorphism in the MAP3K9 gene. These at-risk individuals with the MAP3K9 DNA risk haplotype are a subset of all patients with asthma. Risk populations also include individuals with dysregulation of MAP3K9 gene transcription and dysregulation of a MAP3K9 mRNA isoform for example, an increase in RNA transcripts of MLK1 protein or an isoform of the protein. At-risk populations can have increased MLK1 biochemical activity, increased levels of MLK1 protein or a particular MLK1 protein isoform level can be increased. Thus, at-risk populations with MAP3K9 gene associated asthma can have differences with DNA sequences, RNA regulation and protein expression. These underlying genetic and protein differences can be manipulated in the type and extent of treatment provided.

[0069] Isolation and identification of target populations for treatment of individuals are advantageous for many reasons. For example, it can be possible to identify individuals in a specific at-risk population that respond to a specific treatment, such as treatment with one of the compounds disclosed herein. Samples from individuals with asthma can be tested in a diagnostic assay such as those described herein to assist in identifying the underlying genetic cause of the disease.

[0070] Direct efficient treatment of the subset of the population with an underlying genetic cause of asthma is possible utilizing the diagnositic and treatments described in the instant application. Knowledge of the underlying cause is useful in identifying an individual likely to be a responder to a particular treatment designed for the underlying cause from an individual that is a non-responder to this treatment. For example, if an asthmatic individual is diagnosed as a carrier of a DNA based haplotype or variant of the isoform of MAP3K9 protein, this individual would be more likely to repond to one of the compounds described herein that interfere with the perturbed JNK pathway. Thus, an individual identified by diagnosis as a target at-risk population can have a treatment tailored for the specific diagnosis, thereby reducing possible side effects or other deleterious reactions an individual can have with conventional treatment.

[0071] Generally, conventional treatments typically correct only the symptoms associated with the disease and do not prevent, delay or arrest the progression of the disease. Therefore, specific diagnosis of the target at-risk population and subsequent treatments as described herein, allows the patient to be treated to not only reduce the symptoms associated with the disease but also hold the progression of the disease by remodling the underlying genetic problem.

Nucleic Acid Therapeutic Agents

[0072] In another aspect, a nucleic acid of the invention; a nucleic acid complementary to a nucleic acid of the invention; or a portion of such a nucleic acid (e.g., an oligonucleotide as described below); or a nucleic acid encoding a member of the MLK pathway (e.g., MAP3K9), can be used in “antisense” therapy, in which a nucleic acid (e.g., an oligonucleotide) which specifically hybridizes to the mRNA and/or genomic DNA of a nucleic acid is administered or generated in situ. The antisense nucleic acid that specifically hybridizes to the mRNA and/or DNA inhibits expression of the polypeptide encoded by that mRNA and/or DNA, e.g., by inhibiting translation and/or transcription. Binding of the antisense nucleic acid can be by conventional base pair complementarity, or, for example, in the case of binding to DNA duplexes, through specific interaction in the major groove of the double helix.

[0073] An antisense construct can be delivered, for example, as an expression plasmid as described above. When the plasmid is transcribed in the cell, it produces RNA that is complementary to a portion of the mRNA and/or DNA that encodes the polypeptide for the member of the MLK pathway (e.g., MAP3K9). Alternatively, the antisense construct can be an oligonucleotide probe that is generated ex vivo and introduced into cells; it then inhibits expression by hybridizing with the mRNA and/or genomic DNA of the polypeptide. In one aspect, the oligonucleotide probes are modified oligonucleotides that are resistant to endogenous nucleases, e.g., exonucleases and/or endonucleases, thereby rendering them stable in vivo. Exemplary nucleic acid molecules for use as antisense oligonucleotides are phosphoramidate, phosphothioate and methylphosphonate analogs of DNA (see also U.S. Pat. Nos. 5,176,996, 5,264,564 and 5,256,775). Additionally, general approaches to constructing oligomers useful in antisense therapy are also described, for example, by Van der Krol et al. (Biotechniques 6:958-976 (1988)); and Stein et al. (Cancer Res. 48:2659-2668 (1988)). With respect to antisense DNA, oligodeoxyribonucleotides derived from the translation initiation site are preferred.

[0074] To perform antisense therapy, oligonucleotides (mRNA, cDNA or DNA) are designed that are complementary to mRNA encoding the polypeptide. The antisense oligonucleotides bind to mRNA transcripts and prevent translation. Absolute complementarity, although preferred, is not required. A sequence “complementary” to a portion of an RNA, as referred to herein, indicates that a sequence has sufficient complementarity to be able to hybridize with the RNA, forming a stable duplex; in the case of double-stranded antisense nucleic acids, a single strand of the duplex DNA may thus be tested, or triplex formation may be assayed. The ability to hybridize will depend on both the degree of complementarity and the length of the antisense nucleic acid, as described in detail above. Generally, the longer the hybridizing nucleic acid, the more base mismatches with an RNA it may contain and still form a stable duplex (or triplex, as the case may be). One skilled in the art can ascertain a tolerable degree of mismatch by use of standard procedures.

[0075] The oligonucleotides used in antisense therapy can be DNA, RNA, or chimeric mixtures or derivatives or modified versions thereof, single-stranded or double-stranded. The oligonucleotides can be modified at the base moiety, sugar moiety, or phosphate backbone, for example, to improve stability of the molecule, hybridization, etc. The oligonucleotides can include other appended groups such as peptides (e.g. for targeting host cell receptors in vivo), or agents facilitating transport across the cell membrane (see, e.g., Letsinger et al., Proc. Natl. Acad. Sci. USA 86:6553-6556 (1989); Lemaitre et al., Proc. Natl. Acad. Sci. USA 84:648-652 (1987); PCT International Publication No. WO 88/09810) or the blood-brain barrier (see, e.g., PCT International Publication No. WO 89/10134), or hybridization-triggered cleavage agents (see, e.g., Krol et al., BioTechniques 6:958-976 (1988)) or intercalating agents. (See, e.g., Zon, Pharm. Res. 5: 539-549 (1988)). To this end, the oligonucleotide may be conjugated to another molecule (e.g., a peptide, hybridization triggered cross-linking agent, transport agent, hybridization-triggered cleavage agent).

[0076] The antisense molecules are delivered to cells that express the member of the MLK pathway in vivo. A number of methods can be used for delivering antisense DNA or RNA to cells; e.g., antisense molecules can be injected directly into the tissue site, or modified antisense molecules, designed to target the desired cells (e.g., antisense linked to peptides or antibodies that specifically bind receptors or antigens expressed on the target cell surface) can be administered systematically. Alternatively, in a preferred aspect, a recombinant DNA construct is utilized in which the antisense oligonucleotide is placed under the control of a strong promoter (e.g., pol III or pol II). The use of such a construct to transfect target cells in the patient results in the transcription of sufficient amounts of single stranded RNAs that will form complementary base pairs with the endogenous transcripts and thereby prevent translation of the mRNA. For example, a vector can be introduced in vivo such that it is taken up by a cell and directs the transcription of an antisense RNA. Such a vector can remain episomal or become chromosomally integrated, as long as it can be transcribed to produce the desired antisense RNA. Such vectors can be constructed by recombinant DNA technology methods standard in the art and described above. For example, a plasmid, cosmid, YAC or viral vector can be used to prepare the recombinant DNA construct that can be introduced directly into the tissue site. Alternatively, viral vectors can be used which selectively infect the desired tissue, in which case administration may be accomplished by another route (e.g., systemically).

[0077] In another aspect of the invention, small double-stranded interfering RNA (RNA interference (RNAi)) can be used. RNAI is a post-transcription process, in which double-stranded RNA is introduced, and sequence-specific gene silencing results, though catalytic degradation of the targeted mRNA. See, e.g., Elbashir, S. M. et al., Nature 411:494-498 (2001); Lee, N. S., Nature Biotech. 19:500-505 (2002); Lee, S-K. et al., Nature Medicine 8(7):681-686 (2002) the entire teachings of these references are incorporated herein by reference.

[0078] RNAi is used routinely to investigate gene function in a high throughput fashion or to modulate gene expression in human diseases (Chi et al., PNAS,100 (1 1):6343-6346 (2003)).

[0079] Introduction of long double standed RNA leads to sequence-specific degradation of homologous gene transcripts. The long double stranded RNA is metabolized to small 21-23 nucleotide siRNA (small interfering RNA). The siRNA then binds to protein complex RISC (RNA-induced silencing complex) with dual function helicase. The helicase has RNAas activity and is able to unwind the RNA. The unwound si RNA allows an antisense strand to bind to a target. This results in sequence dependent degradation of cognate mRNA. Aside from endogenous RNAi, exogenous RNAi, chemically synthesized or recombinantly produced can also be used.

[0080] Using non-intronic portions of the MAP3K9 gene such as corresponding mRNA portions of SEQ ID NO: 1, target regions of the MAP3K9 gene that are accessible for RNAi are targeted and silenced. With this technique it is possible to conduct a RNAi gene walk of the nucleic acids of MAP3K9 and determine the amount of inhibition of the protein product. Thus, it is possible to design gene-specific therapeutics by directly targeting the mRNAs of Asthma-related MAP3K9 gene.

[0081] Endogenous expression of a member of the MLK pathway (e.g., MAP3K9) can also be reduced by inactivating or “knocking out” the gene or its promoter using targeted homologous recombination (e.g., see Smithies et al., Nature 317:230-234 (1985); Thomas & Capecchi, Cell 51:503-512 (1987); Thompson et al., Cell 5:313-321 (1989)). For example, an altered, non-functional gene of a member of the MLK pathway (or a completely unrelated DNA sequence) flanked by DNA homologous to the endogenous gene (either the coding regions or regulatory regions of the gene) can be used, with or without a selectable marker and/or a negative selectable marker, to transfect cells that express the gene in vivo. Insertion of the DNA construct, via targeted homologous recombination, results in inactivation of the gene. The recombinant DNA constructs can be directly administered or targeted to the required site in vivo using appropriate vectors, as described above. Alternatively, expression of non-altered genes can be increased using a similar method: targeted homologous recombination can be used to insert a DNA construct comprising a non-altered functional gene, or the complement thereof, or a portion thereof, in place of a gene in the cell, as described above. In another aspect, targeted homologous recombination can be used to insert a DNA construct comprising a nucleic acid that encodes a polypeptide variant that differs from that present in the cell.

[0082] Alternatively, endogenous expression of a member of the MLK pathway can be reduced by targeting deoxyribonucleotide sequences complementary to the regulatory region of the member of the MLK pathway (i.e., the promoter and/or enhancers) to form triple helical structures that prevent transcription of the gene in target cells in the body. (See generally, Helene, C., Anticancer Drug Des., 6(6):569-84 (1991); Helene, C. et al., Ann. N.Y Acad. Sci. 660:27-36 (1992); and Maher, L. J., Bioassays 14(12):807-15 (1992)). Likewise, the antisense constructs described herein, by antagonizing the normal biological activity of one of the members of the MLK pathway, can be used in the manipulation of tissue, e.g., tissue differentiation, both in vivo and for ex vivo tissue cultures. Furthermore, the anti-sense techniques (e.g., microinjection of antisense molecules, or transfection with plasmids whose transcripts are anti-sense with regard to a nucleic acid RNA or nucleic acid sequence) can be used to investigate the role of one or more members of the MLK pathway in the development of disease-related conditions. Such techniques can be utilized in cell culture, but can also be used in the creation of transgenic animals.

[0083] The therapeutic agents as described herein can be delivered in a composition, as described above, or by themselves. They can be administered systemically, or can be targeted to a particular tissue. The therapeutic agents can be produced by a variety of means, including chemical family kinase; recombinant production; in vivo production (e.g., a transgenic animal, such as U.S. Pat. No. 4,873,316 to Meade et al.), for example, and can be isolated using standard means such as those described herein. In addition, a combination of any of the above methods of treatment (e.g., administration of non-altered polypeptide in conjunction with antisense therapy targeting altered mRNA for a member of the MLK pathway; administration of a first splicing variant in conjunction with antisense therapy targeting a second splicing variant) can also be used.

[0084] The invention additionally pertains to use of such therapeutic agents, as described herein, for the manufacture of a medicament for the treatment of asthma and other MAPK39 gene linked respiratory diseases, e.g., using the methods described herein.

Methods of Therapy

[0085] As a result of these discoveries, methods are now available for the treatment of asthma, and other respiratory diseases including but not limited to: chronic obstructive pulmonary disease, chronic bronchitis and other MAP3K9 gene linked respiratory diseases and potentially also other inflammatory diseases (such as rheumatoid arthritis, psoriasis, multiple sclerosis and inflammatory bowel disease) with the use of MLK1 inhibitors, such as agents that inhibit MLK1 kinase activity and thus decrease cellular production of cytokines and other inflammatory mediators as a consequence of cell stimulation. The term “treatment” as used herein, refers not only to ameliorating symptoms associated with the disease or condition, but also preventing or delaying the onset of the disease or condition; preventing or delaying the occurrence of a second episode of the disease or condition; lessening the severity or frequency of symptoms of the disease or condition; and/or also lessening the need for concomitant therapy with other drugs that ameliorate symptoms associated with the disease or condition, e.g., corticosteroids. Methods are additionally available for assessing an individual's risk for developing asthma and/or other respiratory diseases. In one aspect, the individual to be treated is an individual who is susceptible (at an increased risk) for asthma, or for whom the severity of the disease or condition is associated with DNA at-risk haplotypes in the MAP3K9 gene, dysregulation of MAP3K9 mRNA expression, or increased amount of MLK1 protein and/or biochemical activity and/or an increased amount of a particular protein isoform or MLK1.

Methods of Treatment

[0086] The present invention encompasses methods of treatment (prophylactic and/or therapeutic, as described above) for asthma and other respiratory diseases in individuals, such as individuals in the target populations described above, as well as for other diseases and conditions associated with MAP3K9 or with other members of the MLK family kinase. Members of the “JNK pathway,” in particular members of the MLK family kinases as used herein, include other polypeptides (e.g., enzymes, receptors) and other molecules that are associated with JNK pathway signaling, including the transcription factors, c-jun, v-fos and AP-1, or production of an MLK protein, such as transcription of the MAP3K9 gene and production of MLK-1 protein and or the stability of MLK-1 protein. In particular, the invention relates to methods of treatment for asthma or a susceptibility to asthma, using an asthma therapeutic agent. An “asthma therapeutic agent” is an agent that alters (e.g., enhances or inhibits) MAP3K9 polypeptide activity and/or MAP3K9 nucleic acid expression, as described herein (e.g., an asthma nucleic acid antagonist). In certain aspects, the asthma therapeutic agent alters activity and/or nucleic acid expression of MAP3K9.

[0087] Asthma therapeutic agents can alter MAP3K9 polypeptide activity or nucleic acid expression by a variety of means, such as, for example, by decreasing MAP3K9 polypeptide or by downregulating the transcription or translation of the MAP3K9 nucleic acid; by altering posttranslational processing of the MAP3K9 polypeptide; by altering transcription of MAP3K9 splicing variants; or by interfering with MAP3K9 polypeptide activity (e.g., by binding to a MAP3K9 polypeptide), or by binding to another polypeptide that interacts with MAP3K9, by altering (e.g., downregulating) the expression, transcription or translation of a MAP3K9 nucleic acid, or by altering (e.g., agonizing or antagonizing) activity.

[0088] In particular, the invention relates to methods of treatment for asthma or susceptibility to asthma, for example: for individuals in an at-risk population such as those described; as well as methods of treatment for asthma or other respiratory diseases; methods for reducing risk of asthma; and/or for decreasing cellular cytokines through the use of agents that inhibit MLK kinase activity, for example CEP-1347, or compounds as encompassed by formula I and Tables A and B. The invention additionally pertains to use of one or more MKL inhibitors, as described herein, for the manufacture of a medicament for the treatment asthma and other respiratory diseases, e.g., using the methods described herein.

[0089] In the methods of the invention, the “asthma therapeutic agent” is a “MLK family inhibitor”. In one aspect, a “MLK family inhibitor” is an agent that inhibits MAP3K9 polypeptide activity and/or MAP3K9 nucleic acid expression, as described herein (e.g., a nucleic acid antagonist). In another aspect, a MLK family inhibitor is an agent that inhibits polypeptide activity and/or nucleic acid expression of multiple members of the MLK family kinases in the JNK pathway. In still another aspect, a MLK family inhibitor is an agent that alters activity or metabolism of a MLK kinase (e.g., an antagonist of a MLK kinase; an antagonist of a MLK kinase activator). In certain aspects, the MLK inhibitor alters activity and/or nucleic acid expression of MAP3K9.

[0090] MLK family kinase inhibitors can alter polypeptide activity or nucleic acid expression of a member of the JNK pathway, in a variety of means, such as, for example, by catalytically degrading, downregulating or interfering with the expression, transcription or translation of a nucleic acid encoding the member of the JNK pathway; by altering posttranslational processing of the polypeptide; by altering transcription of splicing variants; or by interfering with polypeptide activity (e.g., by binding to the polypeptide, or by binding to another polypeptide that interacts with that member of the JNK pathway, such as a MAP3K9 or MLK1 binding agent as described herein or some other binding agent of a member of the pathway); by altering interaction among two or more members of the MLK family kinases in the JNK pathway; or by antagonizing activity of a member of the JNK pathway.

[0091] Representative MLK family kinase inhibitors include the following:

[0092] agents that inhibit activity of a member of the MLK signalling pathway (e.g., MAP3K9 proteins, MLK1) for example, CEP-1347, and compounds represented by formula I and Tables A and B; agents that inhibit activity of activators of members of the MLK pathway, such as MLK1 activators, MLK2 activators, and MLK3 activators, or agents that bind to a MLK family kinases or otherwise affect the activity of the MLK signaling pathway (for example inhibitors of RAC1/Cdc42, MKK4 and MKK7), other agents that alter (e.g., inhibit or antagonize) expression of a member of the JNK pathway, such as MAP3K9 or MLK family kinase nucleic acid expression or polypeptide activity, or that regulate transcription of MAP3K9 splicing variants or (e.g., agents that affect which splicing variants are expressed, or that affect the amount of each splicing variant that is expressed);

[0093] polypeptides described herein and/or splicing variants encoded by the MAP3K9 nucleic acid or fragments or derivatives thereof;

[0094] other polypeptides (e.g., MAP3K9 activators); MAP3K9 binding agents; or agents that affect (e.g., increase) activity or decrease MAP3K9 polypeptide stability;

[0095] antibodies to MLKs, such as an antibody to an altered MAP3K9 polypeptide, or an antibody to a non-altered MAP3K9 polypeptide, or an antibody to a particular splicing variant encoded by a MAP3K9 nucleic acid as described above; for example MLK3 (A-20):SC 15068, Santa Cruz Biotechnology, Inc., Santa Cruz, Calif.) that can be delivered intracellularly to decrease activity or amount of MLK-1;

[0096] antisense nucleic acids or small double-stranded interfering RNA to nucleic acids encoding MAP3K9 or a MLK family kinase or other member of the JNK pathway, or fragments or derivatives thereof, including antisense nucleic acids to nucleic acids encoding the MAP3K9 or other MLK family kinase polypeptides, and vectors comprising such antisense nucleic acids (e.g., nucleic acid, cDNA, and/or mRNA, double-stranded interfering RNA, or a nucleic acid encoding an active fragment or derivative thereof, or an oligonucleotide; for example, the complement of one of SEQ ID Nos: 1, or a nucleic acid complementary to the nucleic acid encoding SEQ ID NO: 2, or fragments or derivatives thereof); other agents that alter (e.g., inhibit or antagonize) expression of a member of the JNK pathway, such as MAP3K9 or MLK family kinase nucleic acid expression or polypeptide activity, or that regulate transcription of MAP3K9 splicing variants or (e.g., agents that affect which splicing variants are expressed, or that affect the amount of each splicing variant that is expressed).

More than one MLK family kinase inhibitor can be used concurrently, if desired.

[0097] The therapy is designed to alter activity of a MAP3K9 polypeptide, a MLK family kinase or another member of the JNK pathway in an individual, such as by inhibiting or antagonizing activity. For example, a MLK family kinase inhibitor can be administered in order to decrease family kinase of MLKs within the individual, or to downregulate or decrease the expression or availability of the MAP3K9 nucleic acid or specific splicing variants of the MAP3K9 nucleic acid. Downregulation or decreasing expression or availability of a native MAP3K9 nucleic acid or of a particular splicing variant could minimize the expression or activity of a defective nucleic acid or the particular splicing variant and thereby minimize the impact of the defective nucleic acid or the particular splicing variant.

[0098] The MLK family kinase inhibitor(s) are administered in a therapeutically effective amount, i.e., an amount that is sufficient to treat the disease or condition, such as by ameliorating symptoms associated with the disease or condition, preventing or delaying the onset of the disease or condition, and/or also lessening the severity or frequency of symptoms of the disease or condition. The amount which will be therapeutically effective in the treatment of a particular individual's disease or condition will depend on the symptoms and severity of the disease, and can be determined by standard clinical techniques. In addition, in vitro or in vivo assays may optionally be employed to help identify optimal dosage ranges. The precise dose to be employed in the formulation will also depend on the route of administration, and the seriousness of the disease or disorder, and should be decided according to the judgment of a practitioner and each patient's circumstances. Effective doses may be extrapolated from dose-response curves derived from in vitro or animal model test systems.

[0099] In certain aspects of the invention, the MLK family kinase inhibitor agent is an agent that inhibits activity of MAP3K9. In certain methods of the invention, the agents set forth in Formula I, Tables A and B and Formula III (CEP-1347) can be used for prophylactic and/or therapeutic treatment for diseases and conditions associated with MAP3K9 or with other members of MLK family kinases or other members of the JNK pathway, or with increased MLK family kinase activity. In particular, they can be used for treatment for asthma or susceptibility to asthma, such as for individuals in an at-risk population as described above, (e.g., based on identified risk factors) and individual requirement treatment.

[0100] In one aspect of the invention, the MLK family kinase inhibitor is an inhibitor of MLK1 such as CEP-1347 (also known as KT7515, Cephalon, Inc., W. Chester, Pa.) its optically pure stereoisomers, mixtures of stereoisomers, salts, chemical derivatives, analogues, or other compounds inhibiting MAP3K9 that effectively decrease MLK family kinase when administered to humans.

[0101] The compounds contemplated as MLK family kinase inhibitors in the methods described herein can be represented by the following formula: Formula I [chemical structure]
[0102] or a pharmaceutically acceptable salt thereof, wherein:
[0103] one of R¹ and R² is selected from the group consisting of:
[0104] a) —CO(CH₂)ⱼ R⁴, wherein j is 1 to 6, and R⁴ is selected from the group consisting of:
[0105] 1) hydrogen and a halogen;
[0106] 2) —NR⁵ R⁶, wherein R⁵ and R⁶ independently are hydrogen, substituted lower alkyl, unsubstituted lower alkyl, substituted aryl, unsubstituted aryl, substituted heteroaryl, unsubstituted heteroaryl, substituted aralkyl, unsubstituted aralkyl, lower alkylaminocarbonyl, or lower alkoxycarbonyl; or R⁵ and R⁶ are combined with a nitrogen atom to form a heterocyclic group;
[0107] 3) N₃;
[0108] 4) —SR²⁷, wherein R²⁷ is selected from the group consisting of:
[0109] i) hydrogen;
[0110] ii) substituted lower alkyl;
[0111] iii) unsubstituted lower alkyl;
[0112] iv) substituted aryl;
[0113] v) unsubstituted aryl;
[0114] vi) substituted heteroaryl;
[0115] vii) unsubstituted heteroaryl;
[0116] viii) substituted aralkyl;
[0117] ix) unsubstituted aralkyl;
[0118] x) thiazolinyl;
[0119] xi) —(CH₂)ₐ CO₂ R²⁸, wherein a is 1 or 2, and R²⁸ is selected from the group consisting of: hydrogen and lower alkyl; and
[0120] xii) —(CH₂)ₐ CONR⁵ R⁶; and
[0121] 5) OR₂₉ (wherein R₂₉ is hydrogen, substituted lower alkyl, unsubstituted lower alkyl, or COR³⁰ (wherein R³⁰ is hydrogen, lower alkyl, substituted aryl, unsubstituted aryl, substituted heteroaryl, or unsubstituted heteroaryl));
[0122] b) —CH(OH)(CH₂)_{b} R^{4A}, wherein b is 1 to 6 and R^{4A} is hydrogen or the same as R⁴;
[0123] c) —(CH₂)_{d} CHR³¹ CO₂ R³² wherein d is O to 5, R31 is hydrogen, —CONR⁵ R⁶, or —CO₂ R³³ (wherein R³³ is hydrogen or lower alkyl), and R³² is hydrogen or lower alkyl;
[0124] d) —(CH2)_{d} CHR³¹ CONR⁵ R⁶;
[0125] e) —(CH₂)ₖ R⁷ wherein k is 2 to 6, and R⁷is halogen, CO₂R⁸ (wherein R⁸ is hydrogen, lower alkyl, substituted aryl, unsubstituted aryl, substituted heteroaryl, or unsubstituted heteroaryl), CONR⁵ R⁶, substituted aryl, unsubstituted aryl, substituted heteroaryl, unsubstituted heteroaryl, OR⁹ (wherein R⁹ is hydrogen, substituted lower alkyl, unsubstituted lower alkyl, acyl, substituted aryl, or unsubstituted aryl), SR^{27B} (wherein R^{27B} is the same as R²⁷), NR¹⁰ R¹¹ (wherein R¹⁰ and R¹¹ are the same as R⁵ and R⁶) or N₃;
[0126] f) —CH═CH(CH₂)ₘ R¹² wherein m is 0 to 4, and R¹² is hydrogen, lower alkyl, CO₂R^{8A} (wherein R^{8A} is the same as R⁸), —CONR⁵ R⁶, substituted aryl, unsubstituted aryl, substituted heteroaryl, unsubstituted heteroaryl, OR^{9A} (wherein R^{9A} is the same as R⁹), or NR^{10A} R^{11A} (wherein R^{10A} and R^{11A} are the same as R⁵ and R⁶);
[0127] g) —CH=C(CO₂R^{33A})₂, wherein R^{33A} is the same as R³³;
[0128] h) —C≡C(CH₂)ₙ R¹³, wherein n is 0 to 4, and R¹³ is the same as R¹²;
[0129] i) —CH₂OR⁴⁴, wherein R⁴⁴ is substituted lower alkyl;
[0130] and the other of R¹ or R² is selected from the group consisting of:
[0131] j) hydrogen, lower alkyl, halogen, acyl, nitro, NR¹⁴ R¹⁵ (wherein R¹⁴ or R¹⁵ is hydrogen or lower alkyl, and the other is hydrogen, lower alkyl, acyl, carbamoyl, lower alkylaminocarbonyl, substituted arylaminocarbonyl or unsubstituted arylaminocarbonyl);
[0132] k) —CH(SR³⁴)₂, wherein R³⁴ is lower alkyl or alkylene;
[0133] l) —CH₂R³⁵, wherein R³⁵ is OR³⁶ (wherein R³⁶ is tri-lower alkyl silyl in which the three lower alkyl groups are the same or different, or is the same as R²⁹), or SR³⁷ (wherein R³⁷ is the same as R²⁷);
[0134] m) —CO(CH2)_{q} R¹⁶, wherein q is 1 to 6, and R¹⁶ is the same as R⁴;
[0135] n) —CH(OH)(CH₂)ₑ R³⁸, wherein e is 1 to 6, and R³⁸ is the same as R^{4A};
[0136] o) —(CH₂)_{f}CHR³⁹ CO₂R⁴⁰, wherein f is 0 to 5, R³⁹ is the same as R³¹ and R⁴⁰ is the same as R³²;
[0137] p) —(CH₂)ᵣ R¹⁷, wherein r is 2 to 6, and R¹⁷ is the same as R⁷;
[0138] q) —CH═CH(CH₂)ₜR¹⁸, wherein t is 0 to 4, and R¹⁸ is the same as R¹²;
[0139] r) —CH═C(CO₂ R^{33B})₂, wherein R^{33B} is the same as R³³;
[0140] s) —C≡C(CH₂), R¹⁹, wherein u is 0 to 4, and R¹⁹ is the same as R¹³);
[0141] R³ is hydrogen, acyl, or lower alkyl;
[0142] X is selected from the group consisting of:
[0143] a) hydrogen;
[0144] b) formyl;
[0145] c) lower alkoxycarbonyl;
[0146] d) —CONR²⁰ R²¹, wherein:
[0147] R²⁰ and R²¹ independently are:
[0148] hydrogen;
[0149] lower alkyl;
[0150] —CH₂R²², wherein R²² is hydroxy, or
[0151] —NR²³ R²⁴ (wherein R²³ or R²⁴ is hydrogen or lower alkyl, and the other is hydrogen, lower alky, or the residue of an α-amino acid in which the hydroxy group of the carboxyl group is excluded, or R²³ and R²⁴ are combined with a nitrogen atom to form a heterocyclic group); and
[0152] e) —CH═N—R²⁵, wherein R²⁵ is hydroxy, lower alkoxy, amino, guanidino, or imidazolylamino;
[0153] Y is hydroxy, lower alkoxy, aralkyloxy, or acyloxy; or
[0154] X and Y combined represent, —X—Y—, ═O, —CH₂O(C═O)O—, —CH₂OC(═S)O—, —CH₂NR²⁶ C(═O)-(wherein R²⁶ is hydrogen or lower alkyl), —CH.₂ NHC(═S)O—, —CH₂OS(═O)O—, or —CH₂OC(CH₃)₂ O—; and
[0155] W¹ and W² are hydrogen, or W¹ and W² together represent oxygen.

[0156] The compounds represented by formula (I) are hereinafter referred to as Compound (I), and the same applies to the compounds of other formula numbers.

[0157] In the definitions of the groups in the formulas, lower alkyl means a straight-chain or branched alkyl group having 1 to 6 carbon atoms, such as methyl, ethyl, propyl, isopropyl, butyl, isobutyl, sec-butyl, tert-butyl, pentyl, isoamyl, neopentyl, 1-ethylpropyl and hexyl. The lower allyl moiety of lower alkoxy, lower alkoxycarbonyl, lower alkylaminocarbonyl and tri-lower alkylsilyl has the same meaning as lower alkyl defined above. The acyl moiety of the acyl and the acyloxy groups means a straight-chain or branched alkanoyl group having 1 to 6 carbon atoms, such as formyl, acetyl, propanoyl, butyryl, valeryl, pivaloyl and hexanoyl, an arylcarbonyl group described below, or a heteroarylcarbonyl group described below. The aryl moiety of the aryl, the arylcarbonyl and the arylaminocarbonyl groups means a group having 6 to 12 carbon atoms such as phenyl, biphenyl and naphthyl. The heteroaryl moiety of the heteroaryl and the heteroarylcarbonyl groups contain at least one hetero atom selected from O, S, and N, and include pyridyl, pyrimidyl, pyrrolyl, furyl thienyl, imidazolyl triazolyl, tetrazolyl, quinolyl, isoquinolyl benzoimidazolyl thiazolyl and benzothiazolyl. The aralkyl moiety of the aralkyl and the aralkyloxy groups means an aralkyl group having 7 to 15 carbon atoms, such as benzyl, phenethyl, benzhydryl and naphthylmethyl. The substituted lower alkyl group has 1 to 3 independently-selected substituents, such as hydroxy, lower alkoxy, carboxyl, lower alkoxycarbonyl, nitro, amino, mono- or di-lower alkylamino, dioxolane, dioxane, dithiolane, and dithione. The lower alkyl moiety of the substituted lower alkyl, and the lower allyl moiety of the lower alkoxy, the lower alkoxycarbonyl, and the mono- or di-lower alkylamino in the substituents of the substituted lower alkyl group have the same meaning as lower alkyl defined above. The substituted aryl, the substituted heteroaryl and the substituted aralkyl groups each has 1 to 3 independently-selected substituents, such as lower alkyl, hydroxy, lower alkoxy, carboxy, lower alkoxycarbonyl, nitro, amino, mono- or di-lower alkylamino, and halogen. The lower alkyl moiety of the lower alkyl the lower alkoxy, the lower alkoxycarbonyl, and the mono- or di-lower alkylamino groups among the substituents has the same meaning as lower alkyl defined above. The heterocyclic group formed with a nitrogen atom includes pyrrolidinyl, piperidinyl, piperidino, morpholinyl, morpholino, thiomorpholino, N-methylpiperazinyl, indolyl, and isoindolyl. The alpha.-amino acid groups include glycine, alanine, proline, glutamic acid and lysine, which may be in the L-form, the D-form or in the form of a racemate. Halogen includes fluorine, chlorine, bromine and iodine.

[0158] Preferably, one of R¹ and R² is selected from the group consisting of —CH₂)ₖ R⁷, —CH═CH(CH₂)ₘ R¹², —C≡C(CH₂)ₙ R¹³, —CO(CH₂)ⱼ SR²⁷, and —CH₂ OR⁴⁴ wherein R⁴⁴ is methoxymethyl, ethoxymethyl, or methoxyethyl; and the other of R1 and R² is selected from the group consisting of —(CH₂)ᵣ R¹⁷, —CH═CH(CH₂)ₜ R¹⁸, —C≡C(CH₂)ᵤ R¹⁹, NR¹⁴ R¹⁵, hydrogen, halogen, nitro, —CH₂O— (substituted or unsubstituted) lower alkyl, —CO(CH₂)_{q} SR²⁷, —CH₂R³⁵, —CH₂OH, and —CH₂SR³⁷ wherein R³⁷ is selected from the group consisting of lower alkyl, pyridyl, and benzimidazole.

[0159] Preferably, R³⁵ is OR³⁶ wherein R³⁶, preferably, is selected from the group consisting of methoxymethyl, ethoxymethyl, and methoxyethyl.

[0160] Preferably, R²⁷ is selected from the group consisting of substituted or unsubstituted lower alkyl, substituted or unsubstituted phenyl, pyridyl, pyrimidinyl, thiazole, and tetrazole.

[0161] Preferably, k and r, independently, are each 2, 3, or 4.

[0162] Preferably, j and q, independently, are 1 or 2.

[0163] Preferably, R⁷ and R¹⁷, independently, are selected from the group consisting of (1) CO₂ R⁸ and CO₂R^{8A}, where R⁸ and R^{8A}, independently, are hydrogen, methyl, ethyl, or phenyl; (2) phenyl, pyridyl, imidazolyl, thiazolyl, or tetrazolyl;(3) OR⁹ and OR^{9A} where R⁹ and R^{9A}, independently, are hydrogen, methyl, ethyl, phenyl, or acyl; (4) SR^{27B} where R^{27B} is selected from the group consisting of unsubstituted lower alkyl, 2-thiazoline, and pyridyl; and (5) NR¹⁰ R¹¹ and NR¹⁴ R¹⁵, where R¹⁰, R¹¹, R¹⁴, and R¹⁵, independently, are selected from the group consisting of hydrogen, methyl, ethyl, phenyl, carbamoyl, and lower alkylaminocarbonyl.

[0164] Preferably, m, n, t and u, independently, are 0 or 1.

[0165] Preferably, R¹², R¹³, R¹⁴, and R¹⁹, independently, are selected from the group consisting of hydrogen, methyl, ethyl, phenyl, pyridyl, imidazole, thiazole, tetrazole, CO₂R⁸, OR⁹, and NR¹⁰ R¹¹ where R⁸, R⁹, R¹⁰, and R¹¹ have the preferred vales s above.

[0166] Preferably, R³ is hydrogen or acetyl, most preferably hydrogen.

[0167] Preferably, X is hydroxymethyl or lower alkoxycarbonyl with methoxycarbonyl being particularly preferred.

[0168] Preferably, Y is hydroxy or acetyloxy, most preferably hydroxy.

[0169] Preferably, each W¹ and W² is hydrogen.

[0170] Most preferred are the actual substituent values shown on the compounds in Table 1, with Compounds 1-157 being especially preferred.

[0171] Examples of Compound (I) are shown in Table A and the intermediates are shown in Table B.

TABLE A

| Com- | | | | |
|---|---|---|---|---|
| pound | R¹ | R² | R³ | Y |
| 1 | CH═CHCO₂Me | CH═CHCO₂Me | H | OH |
| 2 | CH═CHCO₂Et | H | H | OH |
| 3 | CH═CHCO₂Et | CH═CHCO₂Et | H | OH |
| 4 | CH═CHCO₂Me | H | H | OH |
| 5 | CH═CH—C₆H₅ | H | H | OH |
| 6 | CH═CH—C₆H₅ | CH═CH—C₆H₅ | H | QH |
| 7 | CH═CH-2-Pyr | H | H | QH |
| 8 | CH═CH-2-Pyr | CH═CH-2-Pyr | H | OH |
| 9 | CH₂CH₂—C₆H₅ | CH₂CH₂—C₆H₅ | H | OH |
| 10 | CH₂CH₂—C₆H₅ | H | H | OH |
| 11 | CH₂CH₂-2-Pyr | CH₂CH₂-2-Pyr | H | OH |
| 12 | H | CH═CHCO₂Et | H | OH |
| 13 | H | CH═CH-2-Pyr | H | OH |
| 14 | H | CH₂CH₂-2-Pyr | H | OH |
| 15 | NO₂ | CH═CH-2-Pyr | Ac | OAc |
| 16 | NO₂ | CH═CH-2-Pyr | H | OH |
| 17 | NH₂ | CH₂CH₂-2-Pyr | Ac | OAc |
| 18 | NH₂ | CH₂CH₂-2-Pyr | H | OH |
| 19 | NHCONHEt | CH₂CH₂-2-Pyr | H | OH |
| 20 | C≡CCH₂NMe₂ | C≡CCH₂NMe₂ | H | OH |
| 21 | C≡CCH₂OMe | I | H | OH |
| 22 | C≡CCH₂OMe | C≡CCH₂OMe | H | OH |
| 23 | C≡CCH₂OH | C≡CCH₂OH | H | OH |
| 24 | COCH₂Cl | COCH₂Cl | Ac | OAc |
| 25 | COCH₂-1-Pip | COCH₂-1-Pip | H | OH |
| 26 | COCH₂CH₂Cl | H | Ac | OAc |
| 27 | COCH₂CH₂Cl | COCH₂CH₂Cl | Ac | OAc |
| 28 | COCH₂CH₂-1-Pip | H | H | OH |
| 29 | COCH₂CH₂-1-Pip | COCH₂CH₂-1-Pip | H | OH |
| 30 | COCH₂CH₂-1-Morph | COCH₂CH₂-1-Morph | H | OH |
| 31 | COCH₂-1-Morph | COCH₂-1-Morph | H | OH |
| 32 | COCH₂NMe₂ | COCH₂NMe₂ | H | OH |
| 33a | COCH₂Cl | H | Ac | OAc |
| 33b | H | COCH₂Cl | Ac | OAc |
| 34 | COCH₂NMe₂ | H | H | OH |
| 35 | COCH₂-1-THP | H | H | OH |
| 36a | COCH₂-1-Morph | H | Ac | OAc |
| 36b | H | COCH₂-1-Morph | Ac | OAc |
| 37a | COCH₂-1-Morph | H | H | OH |
| 37b | H | COCH₂-1-Morph | H | OH |
| 38 | COCH₂-1-THP | COCH₂-1-THP | H | OH |
| 39 | COCH₂-1-Pipz(4-Me) | COCH₂-1-Pipz(4-Me) | Ac | OAc |
| 40 | COCH₂-1-Pipz(4-Me) | COCH₂-1-Pipz(4-Me) | H | OH |
| 41 | H | COCH₂SEt | H | OH |
| 42a | COCH₂S-4-Pyr | H | H | OH |
| 42b | H | COCH₂S-4-Pyr | H | OH |
| 43 | COCH₂SMe | COCH₂SMe | H | OH |
| 44 | COCH₂SEt | COCH₂SEt | H | OH |
| 45 | COCH₂SCH₂Et | COCH₂SCH₂Et | H | OH |
| 46 | COCH₂S(CH₂)2 OH | COCH₂S(CH₂)2 OH | H | OH |
| 47 | COCH₂S-4-Pyr | COCH₂S-4-Pyr | H | OH |
| 48 | COCH₂S-2-Pyr | COCH₂S-2-Pyr | H | OH |
| 49 | COCH₂S-2-Pyrm | COCH₂S-2-Pyrm | H | OH |
| 50 | COCH₂S—C₆H₄(4- | COCH₂S—C₆H₄(4-OH) | H | OH |
| | OH) | | | |
| 51 | COCH₂S-2-Thiazl | COCH₂S-2-Thiazl | H | OH |
| 52 | COCH₂S-5-Tet(1-Me) | COCH₂S-5-Tet(1-Me) | H | OH |
| 53 | CO(CH₂)₂SMe | CO(CH₂)₂SMe | H | OH |
| 54 | CO(CH₂)₂OMe | CO(CH₂)₂OMe | H | OH |
| 55 | Br | CO(CH₂)₃H | H | OH |
| 56 | CO(CH₂)₄H | CO(CH₂)₄H | Ac | OAc |
| 57 | COCH₂Br | COCH₂Br | AC | OAc |
| 58 | CH(OH)Me | H | Ac | OAc |
| 59 | CH(OH)(CH₂)₂Cl | CH(OH)(CH₂)₂Cl | H | OH |
| 60 | CH(OH)CH₂-1-Pipz(4- | CH(OH)CH₂-1-Pipz(4-Me) | H | OH |
| | Me) | | | |
| 61 | C≡CCH₂NMe₂ | H | H | OH |
| 62 | Br | C≡CCH₂NMeBn | H | OH |
| 63 | CH═CHCH₂NMe₂ | CH═CHCH₂NMe₂ | Ac | OAc |
| 64 | CH═CHCH₂NMe₂ | CH═CHCH₂NMe₂ | H | OH |
| 65 | CH═CHEt | H | Ac | OAc |
| 66 | CH═CHEt | H | H | OH |
| 67 | CH═CHEt | I | Ac | OAc |
| 68 | CH═CHEt | CH═CHEt | H | OH |
| 69 | (CH₂)₂Cl | (CH₂)₂Cl | H | OH |
| 70a | (CH₂)₂I | (CH₂)₂I | H | OH |
| 70b | (CH₂)₂OCOH | (CH₂)₂OCOH | H | OH |
| 70c | (CH₂)₂OH | (CH₂)₂OH | H | OH |
| 71 | (CH₂)₂OCO-4-Pyr | (CH₂)₂OCO-4-Pyr | H | OH |
| 72a | CH₂CO₂Me | H | H | OH |
| 72b | CH₂CO₂Me | CH₂CO₂Me | H | OH |
| 73a | (CH₂)₃I | (CH₂)₃I | H | OH |
| 73b | (CH₂)₃OCOH | (CH₂)₃OCOH | H | OH |
| 73c | (CH₂)₃OH | (CH₂)₃OH | H | OH |
| 74 | (CH₂)₃OMe | (CH₂)₃OMe | H | OH |
| 75 | (CH₂)₂-1-Pip | (CH₂)₂-1-Pip | H | OH |
| 76 | (CH₂)₂-1-Morph | (CH₂)₂-1-Morph | H | OH |
| 77 | (CH₂)₂NEt₂ | (CH₂)₂NEt₂ | H | OH |
| 78 | (CH₂)₂NMe(CH₂)₂OH | (CH₂)₂NMe(CH₂)₂OH | H | OH |
| 79 | (CH₂)₂NHMe | (CH₂)₂NHMe | H | OH |
| 80 | (CH₂)₂NHCH₂C₆H₄(4- | (CH₂)₂NHCH₂C₆H₄(4- | H | OH |
| | MeO) | MeO) | | |
| 81 | (CH₂)₂N₃ | (CH₂)₂N₃ | H | OH |
| 82 | (CH₂)₃-1-Pip | (CH₂)₃-1-Pip | H | OH |
| 88 | (CH₂)₃-1-Morph | (CH₂)₃-1-Morph | H | OH |
| 84 | (CH₂)₃NEt₂ | (CH₂)₃NEt₂ | H | OH |
| 85 | (CH₂)₃NHCONHEt | (CH₂)₃NHCONHEt | H | OH |
| 86 | (CH₂)₃NHCO₂t-Bu | CH₂)₃NHCO₂t-Bu | H | OH |
| 87 | (CH₂)₂SMe | (CH₂)₂SMe | H | OH |
| 88 | (CH₂)₂SEt | (CH₂)₂SEt | H | OH |
| 89 | (CH₂)₂SCH₂CO₂Me | (CH₂)₂SCH₂CO₂Me | H | OH |
| 90 | (CH₂)₂S(CH₂)₂CO₂Et | (CH₂)₂S(CH₂)₂CO₂Et | H | OH |
| 91 | (CH₂)₂S—C₆H₄(4- | (CH₂)₂S—C₆H₄(4-OH) | H | OH |
| | OH) | | | |
| 92 | (CH₂)₂S-2-Thiazl | (CH₂)₂S-2-Thiazl | H | OH |
| 93 | (CH₂)₂S-4-Pyr | (CH₂)₂S-4-Pyr | H | OH |
| 94 | (CH₂)₂S-2-Pyr | (CH₂)₂S-2-Pyr | H | OH |
| 95 | (CH₂)₃SMe | (CH₂)₃SMe | H | OH |
| 96 | (CH₂)₃S-2- | (CH₂)₃S-2- | H | OH |
| | (Benz)Thiazole | (Benz)Thiazole | | |
| 97 | CH═CH-2-Pyr | CHO | Ac | OAc |
| 98 | CH═CH-2-Pyr | CH₂OH | Ac | OAc |
| 99 | CH═CH-2-Pyr | CH₂OH | H | OH |
| 100 | CH═CH-2-Pyr | CH₂OSiMe₂t-Bu | Ac | OAc |
| 101 | CH═CH-2-Pyr | CH₂OSiMe₂t-Bu | H | OH |
| 102 | CH═CH-2-Pyr | CH₂OMe | H | OH |
| 103 | CH═CH-2-Pyr | CH₂OEt | H | OH |
| 104 | CH═CH-2-Pyr | CH₂O(CH₂)₂NMe₂ | H | OH |
| 105 | CH═CH-2-Pyr | CH₂SEt | H | OH |
| 106 | CH═CH-2-Pyr | CH₂S(CH₂)₂NMe₂ | H | OH |
| 107 | CH═CH-2-Pyr | CH₂S-2-(Benz)Imid | H | OH |
| 108 | CH═CH-2-Pyr | CH₂S-2-Pyr | H | OH |
| 109 | CH═CH-2-Pyr | CH(SEt)₂ | Ac | OAc |
| 110 | CH═CH-2-Pyr | CH(SEt)₂ | H | OH |
| 111 | CHO | CH═CH-2-Pyr | Ac | OAc |
| 112 | CH₂OH | CH═CH-2-Pyr | Ac | OAc |
| 113 | CH₂OH | CH═CH-2-Pyr | H | OH |
| 114 | CH₂OSiMe₂t-Bu | CH═CH-2-Pyr | Ac | OAc |
| 115 | CH₂OSiMe₂t-Bu | CH═CH-2-Pyr | H | OH |
| 116 | CH₂OMe | CH═CH-2-Pyr | H | OH |
| 117 | CH₂OEt | CH═CH-2-Pyr | H | OH |
| 118 | CH₂SEt | CH═CH-2-Pyr | H | OH |
| 119 | CH₂S-2-Pyr | CH═CH-2-Pyr | H | OH |
| 120 | CH₂S-2-(Benz)Imid | CH═CH-2-Pyr | H | OH |
| 121 | CH═CHEt | CH═CH-2-Pyr | Ac | OAc |
| 122 | CH═CHEt | CH═CH-2-Pyr | H | OH |
| 123 | (CH₂)₂-2-Pyr | CH₂OSiMe₂t-Bu | Ac | OAc |
| 124 | (CH₂)₂-2-Pyr | CH₂OSiMe₂t-Bu | H | OH |
| 125a | (CH₂)₂-2-Pyr | CH₂OMe | Ac | OAc |
| 125b | (CH₂)₂-2-Pyr | CH₂OMe | H | OAc |
| 126 | (CH₂)₂-2-Pyr | CH₂OMe | H | OH |
| 127a | (CH₂)₂-2-Pyr | CH₂OEt | H | OH |
| 127b | (CH₂)₂-2-Pyr | CH₂OH | H | OH |
| 128 | (CH₂)₂-2-Pyr | CH₂S-2-Pyr | Ac | OAc |
| 129 | (CH₂)₂-2-Pyr | CH₂S-2-Pyr | H | OH |
| 130 | CH₂OSiMe₂t-Bu | (CH₂)₂-2-Pyr | Ac | OAc |
| 131 | CH₂OSiMe₂t-Bu | (CH₂)₂-2-Pyr | H | OH |
| 132 | CH₂OMe | (CH₂)₂-2-Pyr | H | OH |
| 133 | CH₂OEt | (CH₂)₂-2-Pyr | H | OH |
| 134 | CH₂SEt | (CH₂)₂-2-Pyr | H | OH |
| 135 | CH₂S(CH₂)₂NMe₂ | (CH₂)₂-2-Pyr | H | OH |
| 136 | CH₂S-2-Pyr | (CH₂)₂-2-Pyr | Ac | OAc |
| 137 | CH₂S-2-Pyr | (CH₂)₂-2-Pyr | H | OH |
| *138 | C≡CCH₂OMe | C≡CCH₂OMe | H | OH |
| 139 | CH₂CH₂CO₂Me | CH₂CH₂CO₂Me | H | OH |
| 140 | CH₂CH₂CO₂Et | CH₂CH₂CO₂Et | H | OH |
| 141 | Br | CH═CH-2-Pyr | Ac | OAc |
| 142 | Br | CH═CH-2-Pyr | H | OH |
| 143 | Br | CH₂CH₂-2-Pyr | H | OH |
| 144 | CH═CH-4-Pyr | CH═CH-4-Pyr | Ac | OAc |
| 145 | CH═CH-4-Pyr | CH═CH-4-Pyr | H | OH |
| 146 | CH₂CH₂-4-Pyr | CH₂CH₂-4-Pyr | H | OH |
| 147 | CH═CH-2-Imid | H | Ac | OAc |
| 148 | CH═CH-2-Imid | H | H | OH |
| 149 | CH₂CH₂-2-Imid | H | H | OH |
| 150 | CH═C(CO₂Me)₂ | CH═C(CO₂Me)₂ | Ac | OAc |
| 151 | CH₂CH(CO₂Me)₂ | CH₂CH(CO₂Me)₂ | Ac | OAc |
| 152 | CH₂CH(CO₂Me)₂ | CH₂CH(CO₂Me)₂ | H | OH |
| 153 | n-C₄H₉ | (CH₂)₂-2-Pyr | H | OH |
| 154 | CH₂OCH₂OMe | H | H | OH |
| 155 | CH₂OCH₂OMe | CH₂OCH₂OMe | H | OH |
| 156 | CH₂OCH₂OEt | CH₂OCH₂OEt | H | OH |
| 157 | CH₂O(CH₂)₂OMe | CH₂O(CH₂)₂OMe | H | OH |

Pyr = Pyridyl
Pip = Piperidine
Morph = Morpholine
THP = Tetrahydropyrrole
Pipz = Piperazine
Pyrm = Pyrimidine
Thiazl = Thiazoline
Tet = Tetrazole
Imid = Imidazole
(Benz)Thiazole = Benzothiazole
(Benz)Imid = Benzimidazole
*The CO₂CH₃ group is replaced with CH₂OH.

[0172] TABLE B

| Compound | R1 | R2 | R3 | Y |
|---|---|---|---|---|
| A | Br | H | Ac | OAc |
| B | Br | CHO | Ac | OAc |
| C | H | CHO | Ac | OAc |
| D | NO2 | H | Ac | OAc |
| E | NO2 | CHO | Ac | OAc |
| F | I | I | Ac | OAc |
| G | I | I | H | OH |
| H | I | H | Ac | OAc |
| I | Br | I | Ac | OAc |
| J | CHO | I | Ac | OAc |
| K | CH2OH | I | Ac | OAc |

See U.S. Pat. No. 6,306,849 and WO97/49406, incorporated herein by reference in their entirety.

[0173] The compounds are derivatives of the compound K-252a, represented by the following structure: Formula II. [chemical structure]
K-252a has an indolocarbazole skeleton as described in U.S. Pat. No. 4,555,402 and Japanese Published Unexamined Patent Application No. 41489/85. K-252a is a natural product indolocarbazole of the bacterium Nocardiosis species. The activity of these compounds can be demonstrated using the cultured pinal cord choline acetyltransferase (CHAT) assay.

[0174] Formula III represents, an ethylthiomethyl analog of K-252a, CEP-1347, that exhibited greater efficacy (250% of control) and potency (EC50=50 nM) than K-252a in spinal cord ChAT assays (Kaneko et al., J. Med. Chem. Jun 6;40(12):1863-9 (1997)). In certain aspects, the methods of the invention utilize CEP-1347 as the MLK1 inhibitor.

[chemical structure]

[0175] Formula III (CEP-1347) (* denotes chiral center)

[0176] Some disclosed compounds contain a chiral center. For example, in Formula III, the * denotes chiral centers. The presence of chiral centers in a molecule gives rise to stereoisomers. For example, a pair of optical isomers, referred to as “enantiomers”, exist for every chiral center in a molecule; and a pair of diastereomers exist for every chiral center in a compound having two or more chiral centers. Where the structural formulas do not explicitly depict stereochemistry, it is to be understood that these formulas encompass enantiomers free from the corresponding optical isomer, racemic mixtures, mixtures enriched in one enantiomer relative to its corresponding optical isomer, a diastereomer free of other diastereomers, a pair of diastereomers free from other diasteromeric pairs, mixtures of diasteromers, mixtures of diasteromeric pairs, mixtures of diasteromers in which one diastereomer is enriched relative to the other diastereomer(s) and mixtures of diasteromeric pairs in which one diastereomeric pair is enriched relative to the other diastereomeric pair(s).

[0177] Also compounds of Structural Formula IV (as described in WO 03/064428AI) are useful in the methods described herein as the MLK family kinase inhibitor. Structural Formula IV: [chemical structure]
[0178] wherein A represents O or S;
[0179] W represents O, NH, NR¹;
[0180] R⁴ and R⁵ are independently selected from the group represented by hydrogen, halogen, cyano, nitro, C₁₋₆-alk(en/yn)yl, C₁₋₆-alk(en/yn)yloxy, C₁₋₆-alk(en/yn)yloxy-C₁₋₆-alk(en/yn)yl, C₁₋₆-alk(en/yn)ylsulfanyl, hydroxy, hydroxy-C₁₋₆-alk(en/yn)yl, halo-C₁₋₆-alk(en/yn)yl, halo-C₁₋₆-alk(en/yn)yloxy, C₃₋₈-cycloalk(en)yl, C₃₋₈-cycloalk(en)yl-C₁₋₆-alk(en/yn)yl, acyl, C₁₋₆-alk(en/yn)yloxycarbonyl, C₁₋₆-alk(en/yn)ylsulfonyl, —NR⁷R⁸ and R⁷R⁸N—C₁₋₆-alk(en/yn)yl-;
[0181] R³ represents hydrogen, halogen, C₁₋₆-alk(en/yn)yl, C₃₋₈-cycloalk(en/yn)yl, aryl, a heterocycle, hydroxy, hydroxy-C₁₋₆-alk(en/yn)yl, C₁₋₆-alk(en/yn)yloxy, C₁₋₆-alk(en/yn)yloxy-C₁₋₆-alk(en/yn)yl, C₃₋₈-cycloalk(en/yn)oxy, C₁₋₆-alk(en/yn)ylsulfanyl, acyl, R⁷R⁸N—C₁₋₆-alk(en/yn)yl or —NR⁷R⁸;
[0182] or R³ represents a group of the formula
[0183] —R⁹—Ar²
[0184] wherein R⁹ represents O, NH, NR¹, S, —CONR^{1′}—, —CO— or C₁₋₆-alkyl, C₂₋₆-alkenyl, which may optionally be substituted by OH, halogen, C₁₋₆-alkoxy or C₃₋₈-cycloalkyl;
[0185] R represents C₁₋₆-alk(en/yn)yl, C₃₋₈-cycloalk(en/yn)yl, C₃₋₈-cycloalk(en)yl-C₁₋₆-alk(en/yn)yl or Ar¹;
[0186] Ar¹ and Ar² are independently selected from the group represented by aryl, a heterocycle or a carbocycle all of which may be substituted one or more times by halogen, cyano, nitro, C₁₋₆-alk(en/yn)yl, C₁₋₆-alk(en/yn)yloxy, C₁₋₆-alk(en/yn)yloxy-C₁₋₆-alk(en/yn)yl, C₁₋₆-alk(en/yn)yloxy-C₁₋₆-alk(en/yn)yloxy-C₁₋₆-alk(en/yn)yl aryloxy-, aryl-C₁₋₆-alk(en/yn) yloxy, halo-C₁₋₆-alk(en/yn)yloxy, C₁₋₆-alk(en/yn)yl-sulfanyl, hydroxy, hydroxy-C₁₋₆-alk(en/yn)yl, halo-C₁₋₆-alk(en/yn)yl, cyano-C₁₋₆-alk(en/yn)yl, NR⁷R⁸, NR⁷R⁸-C₁₋₆-alk(en/yn)yl, C₃₋₈-cycloalk(en)yl, C₃₋₈-cycloalk(en)yl-C₁₋₆-alk(en/yn)yl, C₁₋₆-alk(en/yn)ylsulfonyl, aryl, acyl, C₁₋₆-alk(en/yn)yloxycarbonyl, C₁₋₆-alk(en/yn)yl-CONR^{1′}-C₁₋₆-alk(en/yn)yl, C₁₋₆-alk(en/yn)yl-CONR^{1′}—, —CONR⁷R⁸ or R⁷R⁸NCO—C₁₋₆-alk(en/yn)yl;
[0187] R⁷ and R⁸ are independently selected from the group represented by hydrogen and C₁₋₆-alk(en/yn)yl which may be further substituted by hydroxy, halogen, C₁₋₆-alkoxy, cyano, nitro, C₃₋₈-cycloalk(en)yl, C₃₋₈-cycloalk(en)yl-C₁₋₆-alk(en/yn)yl, aryl or a heterocycle; or
[0188] R⁷ and R⁸ together with the nitrogen to which they are attached form a 3-7-membered ring which optionally contains one or more further heteroatoms and may optionally be substituted by halogen, C₁₋₆-alk(en/yn)yl, hydroxy, hydroxy-C₁₋₆-alk(en/yn)yl or acyl;
[0189] the aryls may be further substituted by halogen, cyano, nitro, C₁₋₆-alk(en/yn)yl, C₁₋₆-alk(en/yn)yloxy, C₁₋₆-alk(en/yn)ylsulfanyl, hydroxy, hydroxy-C₁₋₆-alk(en/yn)yl, halo-C₁₋₆-alk(en/yn)yl, halo-C₁₋₆-alk(en/yn)yloxy, C₃₋₈-cycloalk(en)yl, C₃₋₈-cycloalk(en)yl-C₁₋₆-alk(en/yn)yl, acyl, C₁₋₆-alk(en/yn)yloxycarbonyl, C₁₋₆-alk(en/yn)ylsulfonyl, or —NR^{7′}R^{8′} wherein —NR^{7′}R^{8′} is as defined for —NR⁷R⁸ above provided that any aryl substituent on —NR^{7′}R^{8′} is not further substituted;
[0190] and R¹ and R^{1′} are independently selected from the group represented by C₁₋₆-alk(en/yn)yl, C₃₋₈-cycloalk(en)yl, aryl, hydroxy-C₁₋₆-alk(en/yn)yl, C₃₋₈-cycloalk(en)yl-C₁₋₆-alk(en/yn)yl and acyl;
[0191] or a pharmaceutically acceptable salt thereof.

[0192] The term “alkyl” refers to a monovalent group derived from a straight or branched chain saturated hydrocarbon by the removal of a single hydrogen atom. Alkyl groups are exemplified by methyl, ethyl, n- and iso-propyl, n-, sec-, iso- and tert-butyl, and the like. The term “hydroxyalkyl” represents an alkyl group, as defined above, substituted by one to three hydroxyl groups with the proviso that no more than one hydroxy group may be attached to a single carbon atom of the alkyl group. The term “alkylamino” refers to a group having the structure —NHR′ wherein R′ is alkyl, as previously defined, examples of alkylamino include methylamino, ethylamino, iso-propylamino and the like. The term “alkanoyl” represents an alkyl group, as defined above, attached to the parent molecular moiety through a carbonyl group. Alkanoyl groups are exemplified by formyl, acetyl, propionyl, butanoyl and the like. The term “alkanoylamino” refers to an alkanoyl group, as previously defined, attached to the parent molecular moiety through a nitrogen atom. Examples of alkanoylamino include formamido, acetamido, and the like. The term “N-alkanoyl-N-alkylamino” refers to an alkanoyl group, as previously defined, attached to the parent molecular moiety through an aminoalkyl group. Examples of N-alkanoyl-N-alkylamino include N-methylformamido, N-methyl-acetamido, and the like. The terms “alkoxy” or “alkoxyl” denote an alkyl group, as defined above, attached to the parent molecular moiety through an oxygen atom. Representative alkoxy groups include methoxyl, ethoxyl, propoxyl, butoxyl, and the like. The term “alkoxyalkoxyl” refers to an alkyl group, as defined above, attached through an oxygen to an alkyl group, as defined above, attached in turn through an oxygen to the parent molecular moiety. Examples of alkoxyalkoxyl include methoxymethoxyl, methoxyethyoxyl, ethoxyethoxyl and the like. The term “alkoxyalkyl” refers to an alkoxy group, as defined above, attached through an alkylene group to the parent molecular moiety. The term “alkoxycarbonyl” represents an ester group; i.e., an alkoxy group, attached to the parent molecular moiety through a carbonyl group such as methoxycarbonyl, ethoxycarbonyl, and the like. The term “alkenyl” denotes a monovalent group derived from a hydrocarbon containing at least one carbon-carbon double bond by the removal of a single hydrogen atom. Alkenyl groups include, for example, ethenyl, propenyl, butenyl, 1-methyl-2-buten-1-yl and the like. The term “alkylene” denotes a divalent group derived from a straight or branched chain saturated hydrocarbon by the removal of two hydrogen atoms, for example methylene, 1,2-ethylene, 1,1-ethylene, 1,3-propylene, 2,2-dimethylpropylene, and the like. The term “alkenylene” denotes a divalent group derived from a straight or branched chain hydrocarbon containing at least one carbon-carbon double bond. Examples of alkenylene include —CH═CH—, —CH₂CH═CH—, —C(CH₃)═CH—, —CH₂CH═CHCH₂—, and the like. The term “cycloalkylene” refers to a divalent group derived from a saturated carbocyclic hydrocarbon by the removal of two hydrogen atoms, for example cyclopentylene, cyclohexylene, and the like. The term “cycloalkyl” denotes a monovalent group derived from a monocyclic or bicyclic saturated carbocyclic ring compound by the removal of a single hydrogen atom. Examples include cyclopropyl, cyclobutyl, cyclopentyl, cyclohexyl, bicyclo[2.2.1]heptanyl, and bicyclo[2.2.2]octanyl. The term “alkynylene” refers to a divalent group derived by the removal of two hydrogen atoms from a straight or branched chain acyclic hydrocarbon group containing a carbon-carbon triple bond. Examples of alkynylene include —CH s═CH—, —CH≡CH—CH₂—, —CH≡CH—CH(CH₃)—, and the like. The term “carbocyclic aryl” denotes a monovalent carbocyclic ring group derived by the removal of a single hydrogen atom from a monocyclic or bicyclic fused or non-fused ring system obeying the “4n+2 p electron” or Huckel aromaticity rule. Examples of carbocyclic aryl groups include phenyl, 1- and 2-naphthyl, biphenylyl, fluorenyl, and the like. The term “(carbocyclic aryl)alkyl” refers to a carbocyclic aryl ring group as defined above, attached to the parent molecular moiety through an alkylene group. Representative (carbocyclic aryl)alkyl groups include phenylmethyl, phenylethyl, phenylpropyl, 1-naphthylmethyl, and the like. The term “halo or halogen” denotes fluorine, chlorine, bromine or iodine. The term “haloalkyl” denotes an alkyl group, as defined above, having one, two, or three halogen atoms attached thereto and is exemplified by such groups as chloromethyl, bromoethyl, trifluoromethyl, and the like. The term “hydroxyalkyl” represents an alkyl group, as defined above, substituted by one to three hydroxyl groups with the proviso that no more than one hydroxy group may be attached to a single carbon atom of the alkyl group. The term “phenoxy” refers to a phenyl group attached to the parent molecular moiety through an oxygen atom. The term “phenylthio” refers to a phenyl group attached to the parent molecular moiety through a sulfur atom. The term “pyridyloxy” refers to a pyridyl group attached to the parent molecular moiety through an oxygen atom. The terms “heteroaryl” or “heterocyclic aryl” as used herein refers to substituted or unsubstituted 5- or 6-membered ring aromatic groups containing one oxygen atom, one, two, three, or four nitrogen atoms, one nitrogen and one sulfur atom, or one nitrogen and one oxygen atom. The term heteroaryl also includes bi-or tricyclic groups in which the aromatic heterocyclic ring is fused to one or two benzene rings. Representative heteroaryl groups are pyridyl, thienyl, indolyl, pyrazinyl, isoquinolyl, pyrrolyl, pyrimidyl, benzothienyl, furyl, benzo[b]furyl, imidazolyl, thiazolyl, carbazolyl, and the like. The term “heteroarylalkyl” denotes a heteroaryl group, as defined above, attached to the parent molecular moiety through an alkylene group. The term “heteroaryloxy” denotes a heteroaryl group, as defined above, attached to the parent molecular moiety through an oxygen atom. The term “heteroarylalkoxy” denotes a heteroarylalkyl group, as defined above, attached to the parent molecular moiety through an oxygen atom.

[0193] The expression C₁₋₆-alk (en/yn)yl means a C₁₋₆-alkyl, C₂₋₆-alkenyl or a C₂₋₆-alkynyl group. The expression C₃₋₈-cycloank(en)yl means a C₃₋₈-cycloalkyl- or cycloalkenyl group.

[0194] The term C₁₋₆-alkyl refers to a branched or unbranched alkyl group having from one to six carbon atoms inclusive, including but not limited to methyl, ethyl, 1-propyl, 2-propyl, 1-butyl, 2-butyl, 2-methyl-2-propyl and 2-methyl-1-propyl.

[0195] Similarly, C₂₋₆alkenyl and C₂₋₆alkynyl, respectively, designate such groups having from two to six carbon atoms, including one double bond and one triple bond respectively, including but not limited to ethenyl, propenyl, butenyl, ethynyl, propynyl and butynyl.

[0196] The term C₃₋₈-cycloalkyl designates a monocyclic or bicyclic carbocycle having three to eight C-atoms, including but not limited to cyclopropyl, cyclopentyl, cyclohexyl, etc.

[0197] The term C₃₋₈-cycloalkenyl designates a monocyclic or bicyclic carbocycle having three to eight C-atoms and including one double bond.

[0198] In the term C₃₋₈-cycloalkyl(en)yl-C₁₋₆-alk(en/yn)yl, C₃₋₈-cycloalk(en)yl and C₁₋₆-alk(en/yn)yl are as defined above.

[0199] The terms C₁₋₆-alk(en/yn)yloxy, C₁₋₆-alk(en/yn)yloxy-C₁₋₆-alk(en/yn)yl, C₁₋₆-alk(en/yn)ylsulfanyl, hydroxy-C₁₋₆-alk(en/yn)yl, halo-C₁₋₆-alk(en/yn)yl, halo-C₁₋₆-alk(en/yn)yloxy, C₁₋₆-alk(en/yn)ylsulfonyl, cyano-C₁₋₆-alk(en/yn)yl, hydroxy-C₁₋₆-alk en/yn)yl, NR^{x}R^{y}—C₁₋₆-alk(en/yn)yl, NR^{1′}CO—C₁₋₆ (en/yn) yl etc. designate such groups in which the C₁₋₆ (en/yn) yl is as defined above. The terms halo-, hydroxy-, cyano-etc. are to be understood as the C₁₋₆ (en/yn) yl-part can be substituted one or more times with such substituent. The term halo-designates halogen as defined above.

[0200] As used herein, the term C₁₋₆ (en/yn) yloxycarbonyl refers to groups of the formula —COO—C₁₋₆ (en/yn)yl, wherein C₁₋₆ (en/yn)yl are as defined above.

[0201] As used herein, the term acyl refers to formyl, C₁₋₆-alk(en/yn)ylcarbonyl, arylcarbonyl, aryl-C₁₋₆ alk(en/yn)ylcarbonyl, C₃₋₈-cycloalk(en)ylcarbonyl or a C₃₋₈-cycloalk(en)yl-C₁₋₆-alk(en/yn)yl-carbonyl group.

[0202] The term heterocycle designates rings such as 5-membered monocyclic rings such as 3H-1,2,3-oxathiazole, 1,3,2-oxathiazole, 1,2,3-dioxazole, 3H-1,2,3-dithiazole, 1,2,3-dithiazole, 1,2,3-oxadiazole, 1,2,3-thiadiazole, 1H-1,]2,3-triazole, isoxazole, oxazol, isothiazole, thiazole, 1H-imidazole, 1H-pyrazole, 1H-pyrrole, furan or thiophene and 6-membered monocyclic rings such as 1,2,3-oxathiazine, 1,2,4-oxathiazine, 1,2,5-oxathiazine, 1,4,2-oxathiazine, 1,4,3-oxathiazine, 1,2,3-dioxazine, 1,2,4-dioxazine, 4H-1,3,2-dioxazine, 1,4,2-dioxazine, 2H-1, 5,2-dioxazine, 1,2,3-dithiazine, 1,2,4-dithiazine, 4H-1,3,2-dithiazine, 1,4,2-dithiazine, 2H-1,5,2-dithiazine, 2H 1,2,3-oxadiazine, 2H-1,2,4-oxadiazine, 2H-1,2,5-oxadiazine, 2H-1,2,6-oxadiazine, 2H-1,3,4-oxadiazine, 2H-1,2,3-thia-diazine, 2H-1,2,4-thiadiazine, 2H-1,2,5-thiadiazine, 2H-1,2,6-thiadiazine, 2H-1,3,4-thiadiazine, 1,2,3-triazine, 1,2,4-triazine, 2H-1,2-oxazine, 2H-1,3-oxazine, 2H-1,4-oxazine, 2H-1,2-thiazine, 2H-1, 3-thiazine, 2H-1,4-thiazine, pyrazine, pyridazine, pyrimidine, 4H-1,3-oxathiin, 1,4-oxathiin, 4H-1,3-dioxin, 1,4-dioxin, 4H-1,3-dithiin, 1,4-dithiin, pyridine, 2H-pyran or 2H-thiin, bicyclic compounds wherein the above rings are fused to a benzene ring, such as indole, benzofuran, isobenzofuran, benzothiophen, benzimidazol, quinoline, isoquinoline, dihydroquinoline, or completely saturated rings such as morpholin, piperidin, azepin, piperazin, homopiperazin, and ring systems fused to a benzene ring, such as benzodioxan, benzodithiodioxan, benzo [[1,3] dioxol, dihydroindol, dihydrobenzofuran or dihydrobenzothiophen.

[0203] The term aryl refers to carbocyclic, aromatic systems such as phenyl, naphtyl, anthracene and phenantrene.

[0204] The terms aryloxy and aryl-C₁₋₆-alk(en/yn)yloxy refer to aryl as defined and C₁₋₆-alk(en/yn) yloxy as defined above.

[0205] The term carbocyclic refers to partly or completely saturated systems such as cyclohexen, indan or flurene.

[0206] The term heteroatom refers to atoms different from carbon and hydrogen, such as nitrogen, oxygen and sulphur.

[0207] Exemplary of organic acid addition salts according to the invention are those with maleic, fumaric, benzoic, ascorbic, succinic, oxalic, bis-methylenesalicylic, methanesulfonic, ethanedisulfonic, acetic, propionic, tartaric, salicylic, citric, gluconic, lactic, malic, mandelic, cinnamic, citraconic, aspartic, stearic, palmitic, itaconic, glycolic, p-aminobenzoic, glutamic, benzenesulfonic and theophylline acetic acids, as well as the 8-halotheophyllines, for example 8-bromotheophylline. Exemplary of inorganic acid addition salts according to the invention are those with hydrochloric, hydrobromic, sulfuric, sulfamic, phosphoric and nitric acids. The acid addition salts of the invention are preferably pharmaceutically acceptable salts formed with non-toxic acids.

[0208] Furthermore, the compounds used in the methods of this invention may exist in unsolvated as well as in solvated forms with pharmaceutically acceptable solvents such as water, ethanol and the like. In general, the solvated forms are considered equivalent to the unsolvated forms for the purposes of this invention.

[0209] Some of the compounds of the present invention contain chiral centres and such compounds exist in the form of isomers (e.g.. enantiomers). The invention includes all such isomers and any mixtures thereof including racemic mixtures.

[0210] Racemic forms can be resolved into the optical antipodes by known methods, for example, by chromatography on an optically active matrix. The compounds of the present invention may also be resolved by the formation of diastereomeric derivatives.

[0211] Methods standard in the art can be utilized for determining compounds that modulate the MLK family kinase protein activity, in particular MLK1. For example, MLK family kinase protein activity can be determined by measuring the activity of a substrate of the MLK family kinase. Such substrates are well known to those in the art. The substrate is preferably a member of the mitogen activated kinase family or substrates further down the pathway (e.g., JNK1, JNK2, JNK3, ERK1, ERK2, p38α, p38β, p38 γ, p38δ, MEK1, MEK2, MKK3, MKK4(SEK1), MEK5, MKK6, MKK7, jun AFT2 and ELK1, or other members of the pathway described in FIG. 1). Additionally, general substrates of Ser/Thr protein kinases such a myelin basic protein (MBP) can also be used. Reagents and methods for measuring the activity of the substrates are also known to those skilled in the art. The presence of MLK can also be determined by measuring the amount of MLK protein or mRNA encoding the MLK protein, such as the methods described below.

Assessment for At-Risk Haplotypes

[0212] A “haplotype,” as described herein, refers to a combination of genetic markers (“alleles”), such as those set forth in Tables 1 and 2. In a certain aspect, the haplotype can comprise one or more alleles, two or more alleles, three or more alleles, four or more alleles, or five or more alleles. The genetic markers are particular “alleles” at “polymorphic sites” associated with MAPK9. A nucleotide position at which more than one sequence is possible in a population (either a natural population or a synthetic population, e.g., a library of synthetic molecules) is referred to herein as a “polymorphic site”. Where a polymorphic site is a single nucleotide in length, the site is referred to as a single nucleotide polymorphism (“SNP”). For example, if at a particular chromosomal location, one member of a population has an adenine and another member of the population has a thymine at the same position, then this position is a polymorphic site, and, more specifically, the polymorphic site is a SNP. Polymorphic sites can allow for differences in sequences based on substitutions, insertions or deletions. Each version of the sequence with respect to the polymorphic site is referred to herein as an “allele” of the polymorphic site. Thus, in the previous example, the SNP allows for both an adenine allele and a thymine allele.

[0213] Typically, a reference sequence is referred to for a particular sequence. Alleles that differ from the reference are referred to as “variant” alleles. For example, the reference MAP3K9 sequence is described herein by SEQ ID NO: 1. The term, “variant MAP3K9”, as used herein, refers to a sequence that differs from SEQ ID NO: 1, but is otherwise substantially similar. The genetic markers that make up the haplotypes described herein are MAP3K9 variants.

[0214] Additional variants can include changes that affect a polypeptide, e.g., the MAP3K9 polypeptide. These sequence differences, when compared to a reference nucleotide sequence, can include the insertion or deletion of a single nucleotide, or of more than one nucleotide, resulting in a frame shift; the change of at least one nucleotide, resulting in a change in the encoded amino acid; the change of at least one nucleotide, resulting in the generation of a premature stop codon; the deletion of several nucleotides, resulting in a deletion of one or more amino acids encoded by the nucleotides; the insertion of one or several nucleotides, such as by unequal recombination or gene conversion, resulting in an interruption of the coding sequence of a reading frame; duplication of all or a part of a sequence; transposition; or a rearrangement of a nucleotide sequence, as described in detail above. Such sequence changes alter the polypeptide encoded by a MAP3K9 nucleic acid. For example, if the change in the nucleic acid sequence causes a frame shift, the frame shift can result in a change in the encoded amino acids, and/or can result in the generation of a premature stop codon, causing generation of a truncated polypeptide. Alternatively, a polymorphism associated with a susceptibility to asthma can be a synonymous change in one or more nucleotides (i.e., a change that does not result in a change in the amino acid sequence). Such a polymorphism can, for example, alter splice sites, affect the stability or transport of mRNA, or otherwise affect the transcription or translation of the polypeptide. The polypeptide encoded by the reference nucleotide sequence is the “reference” polypeptide with a particular reference amino acid sequence, and polypeptides encoded by variant alleles are referred to as “variant” polypeptides with variant amino acid sequences.

[0215] According to NCBI (National Center for Biotechnology Information), AceView, MAP3K9 is expressed at high levels. The sequence of this gene is supported by 48 sequences from 40 cDNA clones and produces, by alternative splicing, 5 different transcripts aDec03 (variant a), bDec03(variant b), cDec03 (variant c), dDec03, (variant d), and eDec03 (variant e), altogether encoding 5 different protein isoforms. As indicated in Table C.

TABLE C

| mRNA | |
|---|---|
| variant | NCBI Ace view site data |
| aDec03 | This complete mRNA is 7028 bp long. We annotate here the |
| 7028bp | sequence derived from the genome, although the best path through |
| AM_5541bp | the available clones differs from it in 1 position. It has 13 exons. It |
| | has a very long 3′ UTR. The premessenger covers 82.46 kb on the |
| | NCBI build 34, August 2003 genome. The protein (1071 aa, 118.9 kDa, |
| | pI 6.1) contains one SH3 domain motif, one protein kinase |
| | motif. It also contains a coiled coil stretch [Psort2]. Taxblast |
| | (threshold 10\hat{ }−3) tracks ancestors down to Viruses and Eukaryota. |
| bDec03 | This complete CDS mRNA is 5096 bp long. Its sequence exactly |
| AM_5096bp | matches the genome. It has 11 exons. It has a very long 3′ UTR. |
| | The premessenger covers 55.33 kb on the NCBI build 34, August |
| | 2003 genome. The protein (869 aa, 96.5 kDa, pI 6.9) contains one |
| | protein kinase motif. It also contains a coiled coil stretch [Psort2]. |
| | Taxblast (threshold 10\hat{ }−3) tracks ancestors down to Viruses and |
| | Eukaryota. |
| cDec03 | This mRNA is 1829 bp long. It. It has 3 exons. It may be |
| | incomplete at the 5′ end. The premessenger covers 9.56 kb on the |
| | NCBI build 34, August 2003 genome. The protein contains one |
| | SH3 domain motif, one protein kinase motif. Taxblast (threshold |
| | 10\hat{ }−3) tracks ancestors down to Viruses and Bacteria and |
| | Eukaryota. |
| dDec03 | This complete CDS mRNA is 572 bp long. It. It has a single exon. |
| 572bp | The premessenger covers 0.57 kb on the NCBI build 34, August |
| AM_569bp | 2003 genome. The protein (85 aa, 9.2 kDa, pI 7.7) contains no |
| | Pfam motif. It is predicted to localise in the cytoplasm [Psort2]. |
| eDec03 | This partial mRNA, 3′ incomplete is 411 bp long. It. It has a single |
| 411bp | exon. It is partial, truncated at the 3′ end. The premessenger covers |
| AM_411bp | 0.41 kb on the NCBI build 34, August 2003 genome. The partial |
| | protein (80 aa, 9.5 kDa, pI 5.3) contains no Pfam motif. It contains |
| | an ER membrane domain [Psort2]. Taxblast (threshold 10⁻³) tracks |
| | ancestors down to Bilateria. |

[0216] Haplotypes are a combination of genetic markers, e.g., particular alleles at polymorphic sites. The haplotypes described herein, e.g., having markers such as those shown in Table 1 are found more frequently in individuals with asthma than in individuals without asthma. Therefore, these haplotypes have predictive value for detecting a susceptibility to asthma in an individual. The haplotypes described herein are in some cases a combination of various genetic markers, e.g., SNPs and microsatellites. Therefore, detecting haplotypes can be accomplished by methods known in the art for detecting sequences at polymorphic sites, such as the methods described above.

[0217] In certain methods described herein, an individual who is at-risk for asthma is an individual in whom an at-risk haplotype is identified. In one aspect, the at-risk haplotype is one that confers a significant risk of asthma. In one aspect, significance associated with a haplotype is measured by an odds ratio. In a further aspect, the significance is measured by a percentage. In one aspect, a significant risk is measured as an odds ratio of at least about 1.2, including by not limited to: 1.2, 1.3, 1.4, 1.5, 1.6, 1.7, 1.8, and 1.9. In a further aspect, an odds ratio of at least 1.2 is significant. In a further aspect, an odds ratio of at least about 1.5 is significant. In a further aspect, a significant increase in risk is at least about 1.7 is significant. In a further aspect, a significant increase in risk is at least about 20%, including but not limited to about 25%, 30%, 35%, 40%, 45%, 50%, 55%, 60%, 65%, 70%, 75%, 80%, 85%, 90%, 95%, and 98%. In a further aspect, a significant increase in risk is at least about 50%. It is understood however, that identifying whether a risk is medically significant may also depend on a variety of factors, including the specific disease, the haplotype, and often, environmental factors.

[0218] An at-risk haplotype in, or comprising portions of, the MAP3K9 gene, in one where the haplotype is more frequently present in an individual at risk for asthma (affected), compared to the frequency of its presence in a healthy individual (control), and wherein the presence of the haplotype is indicative of susceptibility to asthma. As an example of a simple test for correlation would be a Fisher-exact test on a two by two table. Given a cohort of chromosomes the two by two table is constructed out of the number of chromosomes that include both of the haplotypes, one of the haplotype but not the other and neither of the haplotypes.

[0219] In certain aspects of the invention, at-risk haplotype is an at-risk haplotype within or near MAP3K9 that significantly correlates with a haplotype such as a halotype shown in Table 1. In other aspects, an at-risk haplotype comprises an at-risk haplotype within or near MAP3K9 that significantly correlates with susceptibility to asthma. In one aspect, the at-risk haplotype is characterized by the following microsatellite markers: DG14S1266 and DG14S205, wherein the presence of a 0,4 haplotype is diagnostic of asthma or a susceptibility to asthma. In another aspect, the at-risk haplotype is characterized by the following microsatellite markers: DG14S420 and DG14S399, wherein the presence of a 2,-l1 haplotype is diagnostic of asthma or a susceptibility to asthma. In another aspect, the at-risk haplotype is characterized by the following SNP markers: SG14S89, SG14S152, GS14S174 and SG14S184, wherein the presence of a 3,3,3,3 haplotype is diagnostic of asthma or a susceptibility to asthma. Other haplotype aspects are shown in Table 1.

[0220] Standard techniques for genotyping for the presence of SNPs and/or microsatellite markers can be used, such as fluorescent based techniques (Chen, et al., Genome Res. 9, 492 (1999)), PCR, LCR, Nested PCR and other techniques for nucleic acid amplification. In a preferred aspect, the method comprises assessing in an individual the presence or frequency of SNPs and/or microsatellites in, comprising portions of, the MAP3K9 gene, wherein an excess or higher frequency of the SNPs and/or microsatellites compared to a healthy control individual is indicative that the individual is susceptible to asthma. See, for example, Table 3 (below) and Table 5 for SNPs and markers that can form haplotypes that can be used as screening tools. These markers and SNPs can be identified in at-risk haploptypes. For example, an at-risk haplotype can include microsatellite markers and/or SNPs such as those set forth in Table 1. The presence of the haplotype is indicative of a susceptibility to asthma, and therefore is indicative of an individual who falls within a target population for the treatment methods described herein.

[0221] Haplotype analysis involves defining a candidate susceptibility locus using LOD scores. The defined regions are then ultra-fine mapped with microsatellite markers with an average spacing between markers of less than 100 Kb. All usable microsatellite markers that found in public databases and mapped within that region can be used. In addition, microsatellite markers identified within the deCODE genetics sequence assembly of the human genome can be used. The frequencies of haplotypes in the patient and the control groups using an expectation-maximization algorithm can be estimated (Dempster A. et al., 1977. J. R. Stat. Soc. B, 39:1-389). An implementation of this algorithm that can handle missing genotypes and uncertainty with the phase can be used. Under the null hypothesis, the patients and the controls are assumed to have identical frequencies. Using a likelihood approach, an alternative hypothesis where a candidate at-risk-haplotype, which can include the markers described herein, is allowed to have a higher frequency in patients than controls, while the ratios of the frequencies of other haplotypes are assumed to be the same in both groups is tested. Likelihoods are maximized separately under both hypotheses and a corresponding 1-df likelihood ratio statistic is used to evaluate the statistic significance.

[0222] To look for at-risk-haplotypes in the 1-lod drop, for example, association of all possible combinations of genotyped markers is studied, provided those markers span a practical region. The combined patient and control groups can be randomly divided into two sets, equal in size to the original group of patients and controls. The haplotype analysis is then repeated and the most significant p-value registered is determined. This randomization scheme can be repeated, for example, over 100 times to construct an empirical distribution of p-values. In a preferred aspect, a p-value of <0.05 is indicative of an at-risk haplotype.

A detailed discussion of haplotype analysis follows.

Haplotype Analysis

[0223] Our general approach to haplotype analysis involves using likelihood-based inference applied to NEsted MOdels. The method is implemented in our program NEMO, which allows for many polymorphic markers, SNPs and microsatellites. The method and software are specifically designed for case-control studies where the purpose is to identify haplotype groups that confer different risks. It is also a tool for studying LD structures.

[0224] When investigating haplotypes constructed from many markers, apart from looking at each haplotype individually, meaningful summaries often require putting haplotypes into groups. A particular partition of the haplotype space is a model that assumes haplotypes within a group have the same risk, while haplotypes in different groups can have different risks. Two models/partitions are nested when one, the alternative model, is a finer partition compared to the other, the null model, i.e, the alternative model allows some haplotypes assumed to have the same risk in the null model to have different risks. The models are nested in the classical sense that the null model is a special case of the alternative model. Hence traditional generalized likelihood ratio tests can be used to test the null model against the alternative model. Note that, with a multiplicative model, if haplotypes hᵢ and hⱼ are assumed to have the same risk, it corresponds to assuming that fᵢ/pᵢ=fⱼ/pⱼ where f and p denote haplotype frequencies in the affected population and the control population respectively.

[0225] One common way to handle uncertainty in phase and missing genotypes is a two-step method of first estimating haplotype counts and then treating the estimated counts as the exact counts, a method that can sometimes be problematic (e.g., see the information measure section below) and may require randomization to properly evaluate statistical significance. In NEMO, maximum likelihood estimates, likelihood ratios and p-values are calculated directly, with the aid of the EM algorithm, for the observed data treating it as a missing-data problem.

[0226] NEMO allows complete flexibility for partitions. For example, the first haplotype problem described in the Methods section on Statistical analysis considers testing whether h₁ has the same risk as the other haplotypes h₂, . . . , hₖ. Here the alternative grouping is [h₁], [h₂, . . . , hₖ] and the null grouping is [h₁, . . . , hₖ]. The second haplotype problem in the same section involves three haplotypes h₁=G0, h₂=GX and h₃+AX, and the focus is on comparing h₁ and h₂. The alternative grouping is [h₁], [h₂], [h₃] and the null grouping is [h₁, h₂], [h₃]. If composite alleles exist, one could collapse these alleles into one at the data processing stage, and performed the test as described. This is a perfectly valid approach, and indeed, whether we collapse or not makes no difference if there were no missing information regarding phase. But, with the actual data, if each of the alleles making up a composite correlates differently with the SNP alleles, this will provide some partial information on phase. Collapsing at the data processing stage will unnecessarily increase the amount of missing information. A nested-models/partition framework can be used in this scenario. Let h₂ be split into h₂ₐ, h_{2b}, h₂ₑ, and h₃ be split into h₃ₐ, h_{3b}, . . . , h₃ₑ. Then the alternative grouping is [h₁], [h₂ₐ, h_{2b}, . . . , h₂ₑ], [h₃ₐ, h_{3b}, . . , h₃ₑ] and the null grouping is [h₁, h₂ₐ, h_{2b}, . . . , h₂ₑ], [h₃ₐ, h_{3b}, . . . , h₃ₑ]. The same method can be used to handle composite where collapsing at the data processing stage is not even an option since L_{C} represents multiple haplotypes constructed from multiple SNPs. Alternatively, a 3-way test with the alternative grouping of [h₁], [h₂ₐ, h_{2b}, . . . , h₂ₑ], [h₃ₐ, h_{3b}, . . . , h₃ₑ] versus the null grouping of [h₁, h₂ₐ, h_{2b}, . . . , h₂ₑ, h₃ₐ, h_{3b}, . . . , h₃ₑ] could also be performed. Note that the generalized likelihood ratio test-statistic would have two degrees of freedom instead of one.

Measuring Information

[0227] Even though likelihood ratio tests based on likelihoods computed directly for the observed data, which have captured the information loss due to uncertainty in phase and missing genotypes, can be relied on to give valid p-values, it would still be of interest to know how much information had been lost due to the information being incomplete. Interestingly, one can measure information loss by considering a two-step procedure to evaluating statistical significance that appears natural but happens to be systematically anti-conservative. Suppose we calculate the maximum likelihood estimates for the population haplotype frequencies calculated under the alternative hypothesis that there are differences between the affected population and control population, and use these frequency estimates as estimates of the observed frequencies of haplotype counts in the affected sample and in the control sample. Suppose we then perform a likelihood ratio test treating these estimated haplotype counts as though they are the actual counts. We could also perform a Fisher's exact test, but we would then need to round off these estimated counts since they are in general non-integers. This test will in general be anti-conservative because treating the estimated counts as if they were exact counts ignores the uncertainty with the counts, overestimates the effective sample size and underestimates the sampling variation. It means that the chi-square likelihood-ratio test statistic calculated this way, denoted by Λ*, will in general be bigger than Λ, the likelihood-ratio test-statistic calculated directly from the observed data as described in methods. But Λ* is useful because the ratio Λ/Λ* happens to be a good measure of information, or 1−(Λ/Λ*) is a measure of the fraction of information lost due to missing information. This information measure for haplotype analysis is described in Nicolae and Kong, Technical Report 537, Department of Statistics, University of Statistics, University of Chicago, Revised for Biometrics (2003) as a natural extension of information measures defined for linkage analysis, and is implemented in NEMO.

Statistical Analysis.

[0228] For single marker association to the disease, the Fisher exact test can be used to calculate two-sided p-values for each individual allele. All p-values are presented unadjusted for multiple comparisons unless specifically indicated. The presented frequencies (for microsatellites, SNPs and haplotypes) are allelic frequencies as opposed to carrier frequencies. To minimize any bias due the relatedness of the patients who were recruited as families for the linkage analysis, first and second-degree relatives can be eliminated from the patient list. Furthermore, the test can be repeated for association correcting for any remaining relatedness among the patients, by extending a variance adjustment procedure described in Risch, N. & Teng, J. (Genome Res., 8:1278-1288 (1998)). The relative power of family-based and case-control designs for linkage disequilibrium studies of complex human diseases I. DNA pooling. (ibid) for sibships so that it can be applied to general familial relationships, and present both adjusted and unadjusted p-values for comparison. The differences are in general very small as expected. To assess the significance of single-marker association corrected for multiple testing we carried out a randomisation test using the same genotype data. Cohorts of patients and controls can be randomized and the association analysis redone multiple times (e.g., up to 500,000 times) and the p-value is the fraction of replications that produced a p-value for some marker allele that is lower than or equal to the p-value we observed using the original patient and control cohorts.

[0229] For both single-marker and haplotype analyses, relative risk (RR) and the population attributable risk (PAR) can be calculated assuming a multiplicative model (haplotype relative risk model), (Terwilliger, J. D. & Ott, J., Hum Hered, 42, 337-46 (1992) and Falk, C. T. & Rubinstein, P, Ann Hum Genet 51 (Pt 3), 227-33 (1987)), i.e., that the risks of the two alleles/haplotypes a person carries multiply. For example, if RR is the risk of A relative to a, then the risk of a person homozygote AA will be RR times that of a heterozygote Aa and RR² times that of a homozygote aa. The multiplicative model has a nice property that simplifies analysis and computations—haplotypes are independent, i.e., in Hardy-Weinberg equilibrium, within the affected population as well as within the control population. As a consequence, haplotype counts of the affecteds and controls each have multinomial distributions, but with different haplotype frequencies under the alternative hypothesis. Specifically, for two haplotypes hᵢ and hⱼ, risk(hᵢ)/risk(hⱼ)=(fᵢ/pᵢ)/(fⱼ/pⱼ), where f and p denote respectively frequencies in the affected population and in the control population. While there is some power loss if the true model is not multiplicative, the loss tends to be mild except for extreme cases. Most importantly, p-values are always valid since they are computed with respect to null hypothesis.

[0230] In general, haplotype frequencies are estimated by maximum likelihood and tests of differences between cases and controls are performed using a generalized likelihood ratio test (Rice, J. A. Mathematical Statistics and Data Analysis, 602 (International Thomson Publishing, (1995)). deCODE's haplotype analysis program called NEMO, which stands for NEsted MOdels, can be used to calculate all the haplotype results. To handle uncertainties with phase and missing genotypes, it is emphasized that we do not use a common two-step approach to association tests, where haplotype counts are first estimated, possibly with the use of the EM algorithm, Dempster, (A. P., Laird, N. M. & Rubin, D. B., Journal of the Royal Statistical Society B. 39, 1-38 (1971)) and then tests are performed treating the estimated counts as though they are true counts, a method that can sometimes be problematic and may require randomisation to properly evaluate statistical significance. Instead, with NEMO, maximum likelihood estimates, likelihood ratios and p-values are computed with the aid of the EM-algorithm directly for the observed data, and hence the loss of information due to uncertainty with phase and missing genotypes is automatically captured by the likelihood ratios. Even so, it is of interest to know how much information is retained, or lost, due to incomplete information. Described herein is such a measure that is natural under the likelihood framework. For a fixed set of markers, the simplest tests performed compare one selected haplotype against all the others. Call the selected haplotype hᵢ and the others h₂, . . . , hₖ. Let p₁, . . . , pₖ denote the population frequencies of the haplotypes in the controls, and f₁, . . . , fₖ denote the population frequencies of the haplotypes in the affecteds. Under the null hypothesis, fᵢ=pᵢ for all i. The alternative model we use for the test assumes h₂, . . . , hₖ to have the same risk while h₁ is allowed to have a different risk. This implies that while pi can be different from f₁, fᵢ/(f₂+ . . . +fₖ)=pᵢ/(p₂+ . . . +pₖ)=βᵢ for i=2, . . . , k. Denoting f₁/p₁ by r, and noting that β₂+ . . . +βₖ=1, the test statistic based on generalized likelihood ratios is
Λ=2[l(\hat{r}, \hat{p}₁, \hat{β}₂, . . . , \hat{β}ₖ₋₁)−l(1, \tilde{p}₁, \tilde{β}₂, . . . , \tilde{β}ₖ₋₁)]
where l denotes logₑlikelihood and ~and ˆdenote maximum likelihood estimates under the null hypothesis and alternative hypothesis respectively. A has asymptotically a chi-square distribution with 1-df, under the null hypothesis. Slightly more complicated null and alternative hypotheses can also be used. For example, let h₁ be G0, h₂ be GX and h₃ be AX. When comparing G0 against GX, i.e., this is the test which gives estimated RR of 1.46 and p-value=0.0002, the null assumes G0 and GX have the same risk but AX is allowed to have a different risk. The alternative hypothesis allows, for example, three haplotype groups to have different risks. This implies that, under the null hypothesis, there is a constraint that f₁/p₁=f₂/p₂, or w=[f₁/p₁]/[f₂/p₂]=1. The test statistic based on generalized likelihood ratios is
Λ=2[l(\hat{p}₁, \hat{f}₁, \hat{p}₂, ŵ)−l(\tilde{p}₁, \tilde{f}₁, \tilde{p}₂, 1)]
that again has asymptotically a chi-square distribution with 1-df under the null hypothesis. If there are composite haplotypes (for example, h₂ and h₃), that is handled in a natural manner under the nested models framework.

[0231] LD between pairs of SNPs can be calculated using the standard definition of D′ and R² (Lewontin, R., Genetics 49, 49-67 (1964) and Hill, W. G. & Robertson, A. Theor. Appl. Genet. 22, 226-231 (1968)). Using NEMO, frequencies of the two marker allele combinations are estimated by maximum likelihood and deviation from linkage equilibrium is evaluated by a likelihood ratio test. The definitions of D′ and R² are extended to include microsatellites by averaging over the values for all possible allele combination of the two markers weighted by the marginal allele probabilities. When plotting all marker combination to elucidate the LD structure in a particular region, we plot D′ in the upper left corner and the p-value in the lower right corner. In the LD plots the markers can be plotted equidistant rather than according to their physical location, if desired.

Statistical Methods for Linkage Analysis

[0232] Multipoint, affected-only allele-sharing methods can be used in the analyses to assess evidence for linkage. Results, both the LOD-score and the non-parametric linkage (NPL) score, can be obtained using the program Allegro (Gudbjartsson et al., Nat. Genet. 25:12-3, 2000). Our baseline linkage analysis uses the Spairs scoring function (Whittemore, A. S., Halpern, J. (1994), Biometrics 50:118-27; Kruglyak L, et al. (1996), Am J Hum Genet 58:1347-63), the exponential allele-sharing model (Kong, A. and Cox, N. J. (1997), Am J Hum Genet 61:1179-88) and a family weighting scheme that is halfway, on the log-scale, between weighting each affected pair equally and weighting each family equally. The information measure we use is part of the Allegro program output and the information value equals zero if the marker genotypes are completely uninformative and equals one if the genotypes determine the exact amount of allele sharing by decent among the affected relatives (Gretarsdottir et al., Am. J. Hom. Genet, 70:593-603, (2002)). We computed the P-values two different ways and here report the less significant result. The first P-value can be computed on the basis of large sample theory; the distribution of Zₗᵣ=√(2[logₑ(10)LOD]) approximates a standard normal variable under the null hypothesis of no linkage (Kong, A. and Cox, N. J. (1997), Am J Hum Genet 61:1179-88). The second P-value can be calculated by comparing the observed LOD-score with its complete data sampling distribution under the null hypothesis (e.g., Gudbjartsson et al., Nat. Genet. 25:12-3, 2000). When the data consist of more than a few families, these two P-values tend to be very similar.

Methods for Deriving mRNA Expression Data:

[0233] Real Time (RT)-PCR is used to examine RNA levels of MLK-1 in blood cells and lung tissue of asthma patients and controls. Total RNA is extracted using Trizol and purified with Qia RNaeasy spin columns (Qiagen Inc. Valencia, Calif.). Two μg of total RNA is treated with DNaseI and the RNA was reverse transcribed using the TaqMan Reverse Transcription Reagents kit (N808-0234) and random hexamers. Five ABI SYBR green assays are constructed for estimation of MLK-1 transcripts (variant A-E, Table A). PCR reactions are carried out on a 384 well plate in a total volume of 10 μl on the Applied Biosystems PRISM 7900HT Sequence Detection System (95° C. for 10 minutes followed by 40 cycles of 95° C. for 15 seconds, 60° C. for 1 minute; with a subsequent dissociation step; 95° C. for 15 seconds, 60° C. for 15 seconds, 95° C. for 15 seconds which identifies melting temperatures of PCR products, thus assuring it specificity). The reaction consisted of 1 μl of cDNA, 1× SYBR Green PCR Master Mix (part number 4309155) and 900 nM primers. All reactions were run in quadruplicates for both the five MLK-1 isoforms and the housekeeping gene (Beta actin). The RNA levels (copy numbers) are determined using sequence specific probes that hybridize to PCR products of MLK kinases (e.g., MLK1) by employing the 5′→3′ exonuclease activity of Taq DNA polymerase on RNA samples that are isolated from cells that have been exposed to specific cytokine activators that activate the JNK pathway (such as IL1b and TNFα) vs vehicle alone (i.e., no activation). The TaqMan probe consists of a site-specific sequence labeled with a fluorescent reporter dye and a fluorescent quencher dye. During PCR the TaqMan probe hybridizes to its complementary single strand DNA sequence within the PCR target. When amplification occurs the TaqMan probe is degraded due to the 5′→3′ exonuclease activity of Taq DNA polymerase, thereby separating the quencher from the reporter during extension. Due to the release of the quenching effect on the reporter, the fluorescence intensity of the reporter dye increases. During the entire amplification process this light emission increases exponentially, the final level being measured by spectrophotometry after termination of the PCR. In addition to the MLK kinase (e.g., MLK1) sequence-specific TaqMan probes, SYBR Green are also used as a fluorescent dye. This dye fluoresces only when bound to double-stranded DNA, i.e., when MLK kinase (e.g., MLK1) unique primers bind and successfully allow for Taq DNA polymerase extension of DNA fragment representing the MLK kinase (e.g., MLK1) gene. The use of primers located in unique exons will ensure that Taq DNA polymerase DNA fragments represent the mature RNA structure, furthermore the use of MLK kinase (e.g., MLK1) sequence-specific TaqMan probes allows for discrimation between different RNA splice variants. Three calibrators are used to correct the quantity of the repeated samples for plate-to-plate variation. All values are subsequently normalized to standard corrected housekeeping gene values.

Assessment of MAP3K9 Gene Dysregulation

[0234] In one aspect, the invention relates to methods of measuring RNA levels of the MLK kinases (e.g., MLK1) using Real-Time Quantitative PCR assay in which oligonucleotides specific for members of the MLK kinase family (e.g., MLK1) are used to amplify reverse transcribed RNA (c-DNA) on RNA samples that are isolated from blood leukocytes or other tissue samples. The method includes obtaining a sample of cells from the patient, and determining RNA levels using sequence specific probes that hybridize to PCR products of MLK kinases (e.g., MLK1) by employing the 5′→3′ exonuclease activity of Taq DNA polymerase on RNA samples that are isolated from cells that have been exposed to specific cytokine activators that activate the JNK pathway (such as IL1b or TNFα) vs vehicle alone (i.e., no activation). In one aspect, the TaqMan probe consists of a site-specific sequence labeled with a fluorescent reporter dye and a fluorescent quencher dye wherein, during the PCR reaction, the TaqMan probe hybridizes to its complementary single strand DNA sequence within the PCR target, the final level being measured by spectrophotometry after termination of the PCR. In another aspect, MLK kinase expression (e.g., MLK1) is determined using SYBR Green as a fluorescent dye. This dye fluoresces only when bound to double-stranded DNA, i.e. when MLK kinase (e.g., MLK1) uniquely designed primers bind and allow for successesful Taq DNA polymerase extension of DNA fragment representing the MLK kinase (e.g., MLK1) gene. As such, the use of MLK kinase (e.g., MLK1) sequence-specific TaqMan probes allows for discrimation between different RNA splice variants. In yet another aspect, the invention is directed at methods that determine the role of MAP3k9 or its pathway-related genes, by obtaining a sample of cells from patients with asthma or other respiratory or inflammatory disorders, determining RNA levels of MAP3k9 or its pathway related genes in cells exposed to pathway specific activators (such as IL1b or TNFα) or vehicle alone (no activation), and comparing them with reference RNA levels of the gene in cells isolated from subjects without asthma or other inflammatory/respiratory disorders. In another aspect, the invention relates to methods for predicting efficacy of an inhibitor drug, including obtaining a sample of cells from patients with asthma or another respiratory/inflammatory disorder, determining RNA levels of MAP3k9 or its pathway related genes in cells isolated from patients who are taking the drug compared to those who are not taking the drug. In another aspect, the invention relates to methods for predicting efficacy of an inhibitor drug, including obtaining a sample of cells from patients with asthma or other respiratory/inflammatory disorders, determining RNA levels of MAP3k9 or its pathway related genes after exposure of the cells to the inhibitor drug in vitro.

Monitoring Progress of Treatment

[0235] The current invention also pertains to methods of monitoring the response of an individual, such as an individual in one of the target populations described above, to treatment with a MLK family kinase inhibitor.

[0236] Because the level of inflammatory markers can be elevated in individuals who are in the target populations described above, an assessment of the level of inflammatory markers of the individual both before, and during, treatment with the MLK family kinase inhibitor may indicate whether the treatment has successfully decreased production of MLKs in the airway wall (such as in ASM cells) or in bone-marrow derived inflammatory cells (such as peripheral blood mononuclear (PBM cells). For example, in one aspect of the invention, an individual who is a member of a target population as described above (e.g., an individual at risk for asthma, such as an individual who is at risk due to a MAP3K9 haplotype) can be assessed for response to treatment with a MLK family kinase inhibitor, by examining the individuals MLK kinase levels in different cells and body fluids. Blood, serum, plasma or urinary MLKs kinases (e.g., MLK1), or ex vivo production of MLK kinases (e.g., MLK1), can be measured before, and during or after treatment with the MLK family kinase inhibitor. The MLK or MLK family kinase level before treatment is compared with the MLK family kinase level during or after treatment. The efficacy of treatment is indicated by a decrease in MLK production: a level of MLK family kinase during or after treatment that is significantly lower than the level of MLK family kinase before treatment, is indicative of efficacy. A level that is lower during or after treatment can be shown, for example, by decreased serum or urinary MLKs, or decreased ex vivo production of MLK family kinases. A level that is “significantly lower”, as used herein, is a level that is less than the amount that is typically found in control individual(s), or is less in a comparison of disease risk in a population associated with the other bands of measurement (e.g., the mean or median, the highest quartile or the highest quintile) compared to lower bands of measurement (e.g., the mean or median, the other quartiles; the other quintiles).

[0237] For example, in one aspect of the invention, the level of a MLK family kinase is assessed in an individual before treatment with a MLK family kinase inhibitor; and during or after treatment with the MLK family kinase inhibitor, and the levels are compared. A level of the MLK family kinase during or after treatment that is significantly lower than the level of the MLK family kinase before treatment, is indicative of efficacy of treatment with the MLK family kinase inhibitor. In another aspect, production of a MLK family kinase is analyzed in a first test sample from the individual, and is also determined in a second test sample from the individual, during or after treatment with the MLK family kinase inhibitor, and the level of production in the first test sample is compared with the level of production of the MLK family kinase in the second test sample. A level of the MLK family kinase in the second test sample that is significantly lower than the level of the MLK family kinase in the first test sample is indicative of efficacy of treatment with the MLK family kinase inhibitor.

[0238] In another aspect of the invention, an individual who is a member of a target population of individuals at risk for asthma (e.g., an individual in a target population described above, can be assessed for response to treatment with a MLK family kinase inhibitor, by examining levels of inflammatory markers in the individual. For example, levels of an inflammatory marker in an appropriate test sample (e.g., serum, plasma or urine) can be measured before, and during or after treatment with the MLK family kinase inhibitor. The level of the inflammatory marker before treatment is compared with the level of the inflammatory marker during or after treatment. The efficacy of treatment is indicated by a decrease in the level of the inflammatory marker, that is, a level of the inflammatory marker during or after treatment that is significantly different (e.g., significantly lower), than the level of inflammatory marker before treatment, is indicative of efficacy. Representative inflammatory markers include plasma IL-2, IL-6, IL-1β and TNF-α levels and exhaled nitric oxide (NO).

Pharmaceutical Compositions

[0239] The present invention also pertains to pharmaceutical compositions comprising agents described herein, for example, an agent that is a MLK family kinase inhibitor as described herein. For instance, a MLK family kinase inhibitor can be formulated with a physiologically acceptable carrier or excipient to prepare a pharmaceutical composition. The carrier and composition can be sterile. The formulation should suit the mode of administration.

[0240] Suitable pharmaceutically acceptable carriers include but are not limited to water, salt solutions (e.g., NaCl), saline, buffered saline, alcohols, glycerol, ethanol, gum arabic, vegetable oils, benzyl alcohols, polyethylene glycols, gelatin, carbohydrates such as lactose, amylose or starch, dextrose, magnesium stearate, talc, silicic acid, viscous paraffin, perfume oil, fatty acid esters, hydroxymethylcellulose, polyvinyl pyrolidone, etc., as well as combinations thereof. The pharmaceutical preparations can, if desired, be mixed with auxiliary agents, e.g., lubricants, preservatives, stabilizers, wetting agents, emulsifiers, salts for influencing osmotic pressure, buffers, coloring, flavoring and/or aromatic substances and the like which do not deleteriously react with the active agents.

[0241] The composition, if desired, can also contain minor amounts of wetting or emulsifying agents, or pH buffering agents. The composition can be a liquid solution, suspension, emulsion, tablet, pill, capsule, sustained release formulation, or powder. The composition can be formulated as a suppository, with traditional binders and carriers such as triglycerides. Oral formulation can include standard carriers such as pharmaceutical grades of mannitol, lactose, starch, magnesium stearate, polyvinyl pyrollidone, sodium saccharine, cellulose, magnesium carbonate, etc. Nebulized formulation for inhalation can include sodium chloride, sodium saccharine or sorbitani trioleas, whereas inhalation via compressed carbonated formulation in a puffer can include 1,1,1,2-tetrafluoroethanum, monofluorotrichloromethanum tetrafluorodichloroaethanum or diflurodichloromethanum.

[0242] Methods of introduction of these compositions include, but are not limited to, intradermal, intramuscular, intraperitoneal, intraocular, intravenous, subcutaneous, topical, oral, inhaled and intranasal. Other suitable methods of introduction can also include gene therapy (as described below), rechargeable or biodegradable devices, particle acceleration devices (“gene guns”) and slow release polymeric devices. The pharmaceutical compositions of this invention can also be administered as part of a combinatorial therapy with other agents.

[0243] The composition can be formulated in accordance with the routine procedures as a pharmaceutical composition adapted for administration to human beings. For example, compositions for intravenous administration typically are solutions in sterile isotonic aqueous buffer. Where necessary, the composition may also include a solubilizing agent and a local anesthetic to ease pain at the site of the injection. Generally, the ingredients are supplied either separately or mixed together in unit dosage form, for example, as a dry lyophilized powder or water free concentrate in a hermetically sealed container such as an ampule or sachette indicating the quantity of active agent. Where the composition is to be administered by infusion, it can be dispensed with an infusion bottle containing sterile pharmaceutical grade water, saline or dextrose/water. Where the composition is administered by injection, an ampule of sterile water for injection or saline can be provided so that the ingredients may be mixed prior to administration. Administration by inhalation includes a mixture of the active drug and the above mentioned ingredients.

[0244] For topical application, nonsprayable forms, viscous to semi-solid or solid forms comprising a carrier compatible with topical application and having a dynamic viscosity preferably greater than water, can be employed. Suitable formulations include but are not limited to solutions, suspensions, emulsions, creams, ointments, powders, enemas, lotions, sols, liniments, salves, aerosols, etc., which are, if desired, sterilized or mixed with auxiliary agents, e.g., preservatives, stabilizers, wetting agents, buffers or salts for influencing osmotic pressure, etc. The agent may be incorporated into a cosmetic formulation. For topical application, also suitable are sprayable aerosol preparations wherein the active ingredient, preferably in combination with a solid or liquid inert carrier material, is packaged in a squeeze bottle or in admixture with a pressurized volatile, normally gaseous propellant, e.g., pressurized air.

[0245] Agents described herein can be formulated as neutral or salt forms. Pharmaceutically acceptable salts include those formed with free amino groups such as those derived from hydrochloric, phosphoric, acetic, oxalic, tartaric acids, etc., and those formed with free carboxyl groups such as those derived from sodium, potassium,. ammonium, calcium, ferric hydroxides, isopropylamine, triethylamine, 2-ethylamino ethanol, histidine, procaine, etc.

[0246] The agents are administered in a therapeutically effective amount. The amount of agents which will be therapeutically effective in the treatment of a particular disorder or condition will depend on the nature of the disorder or condition, and can be determined by standard clinical techniques. In addition, in vitro or in vivo assays may optionally be employed to help identify optimal dosage ranges. The precise dose to be employed in the formulation will also depend on the route of administration, and the seriousness of the symptoms, and should be decided according to the judgment of a practitioner and each patient's circumstances. Effective doses may be extrapolated from dose-response curves derived from in vitro or animal model test systems.

[0247] The invention also provides a pharmaceutical pack or kit comprising one or more containers filled with one or more of the ingredients of the pharmaceutical compositions of the invention. Optionally associated with such container(s) can be a notice in the form prescribed by a governmental agency regulating the manufacture, use or sale of pharmaceuticals or biological products, which notice reflects approval by the agency of manufacture, use of sale for human administration. The pack or kit can be labeled with information regarding mode of administration, sequence of drug administration (e.g., separately, sequentially or concurrently), or the like. The pack or kit may also include means for reminding the patient to take the therapy. The pack or kit can be a single unit dosage of the combination therapy or it can be a plurality of unit dosages. In particular, the agents can be separated, mixed together-in any combination, present in a single vial or tablet. Agents assembled in a blister pack or other dispensing means is preferred. For the purpose of this invention, unit dosage is intended to mean a dosage that is dependent on the individual pharmacodynamics of each agent and administered in FDA approved dosages in standard time courses.

Nucleic Acids of the Invention

MAP3K9 Nucleic Acids, Portions and Variants

[0248] The full sequence of the MAP3K9 gene is shown in SEQ ID NO: 1 and FIGS. 7A to 7T. Additional single nucleotide polymorphisms are reported in Table 5 and may or may not be shown in SEQ ID NO: 1. It should be understood that the nucleic acids and their gene products embraced by the invention include the nucleotide sequence set forth in SEQ ID NO: 1 and may further comprise at least one polymorphism as shown in Table 5. Four novel SNPs have been identified.

[0249] Accordingly, the invention pertains to isolated nucleic acid molecules comprising human MAP3K9 nucleic acid. The term, “MAP3K9 nucleic acid,” as used herein, refers to an isolated nucleic acid molecule encoding a MAP3K9 polypeptide (e.g., a MAP3K9 gene, such as shown in SEQ ID NO: 1). The MAP3K9 nucleic acid molecules of the present invention can be RNA, for example, mRNA, or DNA, such as cDNA and genomic DNA. DNA molecules can be double-stranded or single-stranded; single stranded RNA or DNA can be the coding, or sense, strand or the non-coding, or antisense strand. The nucleic acid molecule can include all or a portion of the coding sequence of the gene and can further comprise additional non-coding sequences such as introns and non-coding 3′ and 5′ sequences (including regulatory sequences, for example).

[0250] For example, the MAP3K9 nucleic acid can be the genomic sequence shown in FIGS. 7A to 7T, or a portion or fragment of the isolated nucleic acid molecule (e.g., cDNA or the gene) that encodes MAP3K9 polypeptide.

[0251] Additionally, nucleic acid molecules of the invention can be fused to a marker sequence, for example, a sequence that encodes a polypeptide to assist in isolation or purification of the polypeptide. Such sequences include, but are not limited to, those that encode a glutathione-S-transferase (GST) fusion protein and those that encode a hemagglutinin A (HA) polypeptide marker from influenza.

[0252] An “isolated” nucleic acid molecule, as used herein, is one that is separated from nucleic acids that normally flank the gene or nucleotide sequence (as in genomic sequences) and/or has been completely or partially purified from other transcribed sequences (e.g., as in an RNA library). For example, an isolated nucleic acid of the invention may be substantially isolated with respect to the complex cellular milieu in which it naturally occurs, or culture medium when produced by recombinant techniques, or chemical precursors or other chemicals when chemically synthesized. In some instances, the isolated material will form part of a composition (for example, a crude extract containing other substances), buffer system or reagent mix. In other circumstances, the material may be purified to essential homogeneity, for example as determined by PAGE or column chromatography such as HPLC. Preferably, an isolated nucleic acid molecule comprises at least about 50, 80 or 90% (on a molar basis) of all macromolecular species present. With regard to genomic DNA, the term “isolated” also can refer to nucleic acid molecules that are separated from the chromosome with which the genomic DNA is naturally associated. For example, the isolated nucleic acid molecule can contain less than about 5 kb but not limited to 4 kb, 3 kb, 2 kb, 1 kb, 0.5 kb or 0.1 kb of nucleotides which flank the nucleic acid molecule in the genomic DNA of the cell from which the nucleic acid molecule is derived.

[0253] The nucleic acid molecule can be fused to other coding or regulatory sequences and still be considered isolated. Thus, recombinant DNA contained in a vector is included in the definition of “isolated” as used herein. Also, isolated nucleic acid molecules include recombinant DNA molecules in heterologous host cells, as well as partially or substantially purified DNA molecules in solution. “Isolated” nucleic acid molecules also encompass in vivo and in vitro RNA transcripts of the DNA molecules of the present invention. An isolated nucleic acid molecule can include a nucleic acid molecule or nucleic acid sequence that is synthesized chemically or by recombinant means. Therefore, recombinant DNA contained in a vector is included in the definition of “isolated” as used herein. Also, isolated nucleic acid molecules include recombinant DNA molecules in heterologous organisms, as well as partially or substantially purified DNA molecules in solution. In vivo and in vitro RNA transcripts of the DNA molecules of the present invention are also encompassed by “isolated” nucleic acid sequences. Such isolated nucleic acid molecules are useful in the manufacture of the encoded polypeptide, as probes for isolating homologous sequences (e.g., from other mammalian species), for gene mapping (e.g., by in situ hybridization with chromosomes), or for detecting expression of the gene in tissue (e.g., human tissue), such as by Northern or Southern blot analysis.

[0254] The present invention also pertains to nucleic acid molecules which are not necessarily found in nature but which encode a MAP3K9 polypeptide, or another splicing variant of a MAP3K9 polypeptide or polymorphic variant thereof. Thus, for example, the invention pertains to DNA molecules comprising a sequence that is different from the naturally occurring nucleotide sequence but which, due to the degeneracy of the genetic code, encode a MAP3K9 polypeptide of the present invention. The invention also encompasses nucleic acid molecules encoding portions (fragments), or encoding variant polypeptides such as analogues or derivatives of a MAP3K9 polypeptide. Such variants can be naturally occurring, such as in the case of allelic variation or single nucleotide polymorphisms, or non-naturally-occurring, such as those induced by various mutagens and mutagenic processes. Intended variations include, but are not limited to, addition, deletion and substitution of one or more nucleotides that can result in conservative or non-conservative amino acid changes, including additions and deletions. Preferably the nucleotide (and/or resultant amino acid) changes are silent or conserved; that is, they do not alter the characteristics or activity of a MAP3K9 polypeptide. In one aspect, the nucleic acid sequences are fragments that comprise one or more polymorphic microsatellite markers. In another aspect, the nucleotide sequences are fragments that comprise one or more single nucleotide polymorphisms in a MAP3K9 gene.

[0255] Other alterations of the nucleic acid molecules of the invention can include, for example, labeling, methylation, internucleotide modifications such as uncharged linkages (e.g., methyl phosphonates, phosphotriesters, phosphoamidates, carbamates), charged linkages (e.g., phosphorothioates, phosphorodithioates), pendent moieties (e.g., polypeptides), intercalators (e.g., acridine, psoralen), chelators, alkylators, and modified linkages (e.g., alpha anomeric nucleic acids). Also included are synthetic molecules that mimic nucleic acid molecules in the ability to bind to a designated sequence via hydrogen bonding and other chemical interactions. Such molecules include, for example, those in which peptide linkages substitute for phosphate linkages in the backbone of the molecule.

[0256] The invention also pertains to nucleic acid molecules that hybridize under high stringency hybridization conditions, such as for selective hybridization, to a nucleotide sequence described herein (e.g., nucleic acid molecules which specifically hybridize to a nucleotide sequence encoding polypeptides described herein, and, optionally, have an activity of the polypeptide). In one aspect, the invention includes variants described herein that hybridize under high stringency hybridization conditions (e.g., for selective hybridization) to a nucleotide sequence encoding an amino acid sequence or a polymorphic variant thereof. In another aspect, the variant that hybridizes under high stringency hybridizations has an activity of a MAP3K9 polypeptide.

[0257] Such nucleic acid molecules can be detected and/or isolated by specific hybridization (e.g., under high stringency conditions). “Specific hybridization,” as used herein, refers to the ability of a first nucleic acid to hybridize to a second nucleic acid in a manner such that the first nucleic acid does not hybridize to any nucleic acid other than to the second nucleic acid (e.g., when the first nucleic acid has a higher similarity to the second nucleic acid than to any other nucleic acid in a sample wherein the hybridization is to be performed). “Stringency conditions” for hybridization is a term of art which refers to the incubation and wash conditions, e.g., conditions of temperature and buffer concentration, which permit hybridization of a particular nucleic acid to a second nucleic acid; the first nucleic acid may be perfectly (i.e., 100%) complementary to the second, or the first and second may share some degree of complementarity which is less than perfect (e.g., 70%, 75%, 85%, 90%, 95%). For example, certain high stringency conditions can be used which distinguish perfectly complementary nucleic acids from those of less complementarity. “High stringency conditions”, “moderate stringency conditions” and “low stringency conditions” for nucleic acid hybridizations are explained on pages 2.10.1-2.10.16 and pages 6.3.1-6.3.6 in Current Protocols in Molecular Biology (Ausubel, F. M. et al., “Current Protocols in Molecular Biology”, John Wiley & Sons, (2001)), the entire teachings of which are incorporated by reference herein). The exact conditions which determine the stringency of hybridization depend not only on ionic strength (e.g., 0.2×SSC, 0.1×SSC), temperature (e.g., room temperature, 42° C., 68° C.) and the concentration of destabilizing agents such as formamide or denaturing agents such as SDS, but also on factors such as the length of the nucleic acid sequence, base composition, percent mismatch between hybridizing sequences and the frequency of occurrence of subsets of that sequence within other non-identical sequences. Thus, equivalent conditions can be determined by varying one or more of these parameters while maintaining a similar degree of identity or similarity between the two nucleic acid molecules. Typically, conditions are used such that sequences at least about 60%, at least about 70%, at least about 80%, at least about 90%, or at least about 95% or more identical to each other remain hybridized to one another. By varying hybridization conditions from a level of stringency at which no hybridization occurs to a level at which hybridization is first observed, conditions which will allow a given sequence to hybridize (e.g., selectively) with the most similar sequences in the sample can be determined.

[0258] Exemplary conditions are described in Krause, M. H. and S. A. Aaronson, Methods in Enzymology 200:546-556 (1991), and in, Ausubel, et al., “Current Protocols in Molecular Biology”, John Wiley & Sons, (2001), which describes the determination of washing conditions for moderate or low stringency conditions. Washing is the step in which conditions are usually set so as to determine a minimum level of complementarity of the hybrids. Generally, starting from the lowest temperature at which only homologous hybridization occurs, each ° C. by which the final wash temperature is reduced (holding SSC concentration constant) allows an increase by 1% in the maximum extent of mismatching among the sequences that hybridize. Generally, doubling the concentration of SSC results in an increase in Tₘ of −17° C. Using these guidelines, the washing temperature can be determined empirically for high, moderate or low stringency, depending on the level of mismatch sought.

[0259] For example, a low stringency wash can comprise washing in a solution containing 0.2×SSC/0.1% SDS for 10 minutes at room temperature; a moderate stringency wash can comprise washing in a pre-warmed solution (42° C.) solution containing 0.2×SSC/0.1% SDS for 15 minutes at 42° C.; and a high stringency wash can comprise washing in pre-warmed (68° C.) solution containing 0.1×SSC/0.1% SDS for 15 minutes at 68° C. Furthermore, washes can be performed repeatedly or sequentially to obtain a desired result as known in the art. Equivalent conditions can be determined by varying one or more of the parameters given as an example, as known in the art, while maintaining a similar degree of identity or similarity between the target nucleic acid molecule and the primer or probe used.

[0260] The percent homology or identity of two nucleotide or amino acid sequences can be determined by aligning the sequences for optimal comparison purposes (e.g., gaps can be introduced in the sequence of a first sequence for optimal alignment). The nucleotides or amino acids at corresponding positions are then compared, and the percent identity between the two sequences is a function of the number of identical positions shared by the sequences (i.e., % identity=# of identical positions/total # of positions×100). When a position in one sequence is occupied by the same nucleotide or amino acid residue as the corresponding position in the other sequence, then the molecules are homologous at that position. As used herein, nucleic acid or amino acid “homology” is equivalent to nucleic acid or amino acid “identity”. In certain aspects, the length of a sequence aligned for comparison purposes is at least 30%, for example, at least 40%, in certain aspects at least 60%, and in other aspects at least 70%, 80%, 90% or 95% of the length of the reference sequence. The actual comparison of the two sequences can be accomplished by well-known methods, for example, using a mathematical algorithm. A preferred, non-limiting example of such a mathematical algorithm is described in Karlin et al., Proc. Natl. Acad. Sci. USA 90:5873-5877 (1993). Such an algorithm is incorporated into the NBLAST and XBLAST programs (version 2.0) as described in Altschul et al., Nucleic Acids Res. 25:389-3402 (1997). When utilizing BLAST and Gapped BLAST programs, the default parameters of the respective programs (e.g., NBLAST) can be used. In one aspect, parameters for sequence comparison can be set at score=100, wordlength=12, or can be varied (e.g., W=5 or W=20).

[0261] Another preferred non-limiting example of a mathematical algorithm utilized for the comparison of sequences is the algorithm of Myers and Miller, CABIOS 4(1): 11-17 (1988). Such an algorithm is incorporated into the ALIGN program (version 2.0) which is part of the GCG sequence alignment software package (Accelrys, Cambridge, UK). When utilizing the ALIGN program for comparing amino acid sequences, a PAM120 weight residue table, a gap length penalty of 12, and a gap penalty of 4 can be used. Additional algorithms for sequence analysis are known in the art and include ADVANCE and ADAM as described in Torellis and Robotti, Comput. Appl. Biosci. 10:3-5 (1994); and FASTA described in Pearson and Lipman, Proc. Natl. Acad. Sci. USA 85:2444-8 (1988).

[0262] In another aspect, the percent identity between two amino acid sequences can be accomplished using the GAP program in the GCG software package using either a BLOSUM63 matrix or a PAM250 matrix, and a gap weight of 12, 10, 8, 6, or 4 and a length weight of 2, 3, or 4. In yet another aspect, the percent identity between two nucleic acid sequences can be accomplished using the GAP program in the GCG software package using a gap weight of 50 and a length weight of 3.

[0263] The present invention also provides isolated nucleic acid molecules that contain a fragment or portion that hybridizes under highly stringent conditions to a nucleotide sequence of SEQ ID NO: 1 or the complement of such a sequence, and also provides isolated nucleic acid molecules that contain a fragment or portion that hybridizes under highly stringent conditions to a nucleotide sequence encoding an amino acid sequence or polymorphic variant thereof. The nucleic acid fragments of the invention are at least about 15, preferably at least about 18, 20, 23 or 25 nucleotides, and can be 30, 40, 50, 100, 200 or more nucleotides in length. Longer fragments, for example, 30 or more nucleotides in length, that encode antigenic polypeptides described herein are particularly useful, such as for the generation of antibodies as described below.

Probes and Primers

[0264] In a related aspect, the nucleic acid fragments of the invention are used as probes or primers in assays such as those described herein. “Probes” or “primers” are oligonucleotides that hybridize in a base-specific manner to a complementary strand of nucleic acid molecules. Such probes and primers include polypeptide nucleic acids, as described in Nielsen et al., Science 254:1497-1500 (1991).

[0265] A probe or primer comprises a region of nucleotide sequence that hybridizes to at least about 15, for example about 20-25, and in certain aspects about 40, 50 or 75, consecutive nucleotides of a nucleic acid molecule comprising a contiguous nucleotide sequence of SEQ ID NO: 1 or polymorphic variant thereof. In other aspects, a probe or primer comprises 100 or fewer nucleotides, in certain aspects from 6 to 50 nucleotides, for example from 12 to 30 nucleotides. In other aspects, the probe or primer is at least 70% identical to the contiguous nucleotide sequence or to the complement of the contiguous nucleotide sequence, for example at least 80% identical, in certain aspects at least 90% identical, and in other aspects at least 95% identical, or even capable of selectively hybridizing to the contiguous nucleotide sequence or to the complement of the contiguous nucleotide sequence. Often, the probe or primer further comprises a label, e.g., radioisotope, fluorescent compound, enzyme, or enzyme co-factor.

[0266] The nucleic acid molecules of the invention such as those described above can be identified and isolated using standard molecular biology techniques and the sequence information provided herein. For example, nucleic acid molecules can be amplified and isolated by the polymerase chain reaction using synthetic oligonucleotide primers designed based on the sequence of SEQ ID NO: 1 or the complement of such a sequence, or designed based on nucleotides based on sequences encoding one or more of the amino acid sequences provided herein. See generally PCR Technology: Principles and Applications for DNA Amplification (ed. H. A. Erlich, Freeman Press, NY, N.Y., 1992); PCR Protocols: A Guide to Methods and Applications (Eds. Innis et al., Academic Press, San Diego, Calif., 1990); Mattila et al., Nuc. Acids Res. 19: 4967 (1991); Eckert et al., PCR Methods and Applications 1:17 (1991); PCR (eds. McPherson et al., IRL Press, Oxford); and U.S. Pat. No. 4,683,202. The nucleic acid molecules can be amplified using cDNA, mRNA or genomic DNA as a template, cloned into an appropriate vector and characterized by DNA sequence analysis.

[0267] Other suitable amplification methods include the ligase chain reaction (LCR) (see Wu and Wallace, Genomics 4:560 (1989), Landegren et al., Science 241:1077 (1988), transcription amplification (Kwoh et al., Proc. Natl. Acad. Sci. USA 86:1173 (1989)), and self-sustained sequence replication (Guatelli et al., Proc. Nat. Acad. Sci. USA 87:1874 (1990)) and nucleic acid based sequence amplification (NASBA). The latter two amplification methods involve isothermal reactions based on isothermal transcription, which produce both single stranded RNA (ssRNA) and double stranded DNA (dsDNA) as the amplification products in a ratio of about 30 or 100 to 1, respectively.

[0268] The amplified DNA can be labeled, for example, radiolabeled, and used as a probe for screening a cDNA library derived from human cells, mRNA in zap express, ZIPLOX or other suitable vector. Corresponding clones can be isolated, DNA can obtained following in vivo excision, and the cloned insert can be sequenced in either or both orientations by art recognized methods to identify the correct reading frame encoding a polypeptide of the appropriate molecular weight. For example, the direct analysis of the nucleotide sequence of nucleic acid molecules of the present invention can be accomplished using well-known methods that are commercially available. See, for example, Sambrook et al., Molecular Cloning, A Laboratory Manual (2nd Ed., CSHP, New York 1989); Zyskind et al., Recombinant DNA Laboratory Manual, (Acad. Press, 1988)). Additionally, fluorescence methods are also available for analyzing nucleic acids (Chen et al., Genome Res. 9, 492 (1999)) and polypeptides. Using these or similar methods, the polypeptide and the DNA encoding the polypeptide can be isolated, sequenced and further characterized.

[0269] Antisense nucleic acid molecules of the invention can be designed using the nucleotide sequence of SEQ ID NO: 1 and/or the complement or a portion, and constructed using chemical synthesis and enzymatic ligation reactions using procedures known in the art. For example, an antisense nucleic acid molecule (e.g., an antisense oligonucleotide) can be chemically synthesized using naturally occurring nucleotides or variously modified nucleotides designed to increase the biological stability of the molecules or to increase the physical stability of the duplex formed between the antisense and sense nucleic acids, e.g., phosphorothioate derivatives and acridine substituted nucleotides can be used. Alternatively, the antisense nucleic acid molecule can be produced biologically using an expression vector into which a nucleic acid molecule has been subcloned in an antisense orientation (i.e., RNA transcribed from the inserted nucleic acid molecule will be of an antisense orientation to a target nucleic acid of interest).

[0270] The nucleic acid sequences can also be used to compare with endogenous DNA sequences in patients to identify one or more of the disorders described above, and as probes, such as to hybridize and discover related DNA sequences or to subtract out known sequences from a sample. The nucleic acid sequences can further be used to derive primers for genetic fingerprinting, to raise anti-polypeptide antibodies using DNA immunization techniques, and as an antigen to raise anti-DNA antibodies or elicit immune responses. Portions or fragments of the nucleotide sequences identified herein (and the corresponding complete gene sequences) can be used in numerous ways, such as polynucleotide reagents. For example, these sequences can be used to: (i) map their respective genes on a chromosome; and, thus, locate gene regions associated with genetic disease; (ii) identify an individual from a minute biological sample (tissue typing); and (iii) aid in forensic identification of a biological sample. Additionally, the nucleotide sequences of the invention can be used to identify and express recombinant polypeptides for analysis, characterization or therapeutic use, or as markers for tissues in which the corresponding polypeptide is expressed, either constitutively, during tissue differentiation, or in diseased states. The nucleic acid sequences can additionally be used as reagents in the screening and/or diagnostic assays described herein, and can also be included as components of kits (e.g., reagent kits) for use in the screening and/or diagnostic assays described herein.

[0271] Kits (e.g., reagent kits) useful in the methods of diagnosis comprise components useful in any of the methods described herein, including for example, hybridization probes or primers as described herein (e.g., labeled probes or primers), reagents for detection of labeled molecules, restriction enzymes (e.g., for RFLP analysis), allele-specific oligonucleotides, antibodies which bind to altered or to non-altered (native) MAP3K9 polypeptide, means for amplification of nucleic acids comprising a MAP3K9 nucleic acid, or means for analyzing the nucleic acid sequence of a MAP3K9 nucleic acid or for analyzing the amino acid sequence of a MAP3K9 polypeptide as described herein, etc. In one aspect, the kit for diagnosing a asthma or a susceptibility to asthma can comprise primers for nucleic acid amplification of a region in the MAP3K9 nucleic acid comprising an at-risk haplotype that is more frequently present in an individual having asthma or who is susceptible to asthma. The primers can be designed using portions of the nucleic acids flanking SNPs that are indicative of asthma. In a certain aspect, the primers are designed to amplify regions of the MAP3K9 gene associated with an at-risk haplotype for asthma, as shown in Table 1.

Vectors and Host Cells

[0272] Another aspect of the invention pertains to nucleic acid constructs containing a nucleic acid molecules described herein and the complements thereof (or a portion thereof). The constructs comprise a vector (e.g., an expression vector) into which a sequence of the invention has been inserted in a sense or antisense orientation. As used herein, the term “vector” refers to a nucleic acid molecule capable of transporting another nucleic acid to which it has been linked. One type of vector is a “plasmid”, which refers to a circular double stranded DNA loop into which additional DNA segments can be ligated. Another type of vector is a viral vector, wherein additional DNA segments can be ligated into the viral genome. Certain vectors are capable of autonomous replication in a host cell into which they are introduced (e.g., bacterial vectors having a bacterial origin of replication and episomal mammalian vectors). Other vectors (e.g., non-episomal mammalian vectors) are integrated into the genome of a host cell upon introduction into the host cell, and thereby are replicated along with the host genome. Expression vectors are capable of directing the expression of genes to which they are operably linked. In general, expression vectors of utility in recombinant DNA techniques are often in the form of plasmids. However, the invention is intended to include such other forms of expression vectors, such as viral vectors (e.g., replication defective retroviruses, adenoviruses and adeno-associated viruses) that serve equivalent functions.

[0273] In certain aspects, recombinant expression vectors of the invention comprise a nucleic acid molecule of the invention in a form suitable for expression of the nucleic acid molecule in a host cell. This means that the recombinant expression vectors include one or more regulatory sequences, selected on the basis of the host cells to be used for expression, which is operably linked to the nucleic acid sequence to be expressed. Within a recombinant expression vector, “operably linked” or “operatively linked” is intended to mean that the nucleotide sequence of interest is linked to the regulatory sequence(s) in a manner which allows for expression of the nucleotide sequence (e.g., in an in vitro transcription/translation system or in a host cell when the vector is introduced into the host cell). The term “regulatory sequence” is intended to include promoters, enhancers and other expression control elements (e.g., polyadenylation signals). Such regulatory sequences are described, for example, in Goeddel, “Gene Expression Technology”, Methods in Enzymology 185, Academic Press, San Diego, Calif. (1990). Regulatory sequences include those which direct constitutive expression of a nucleotide sequence in many types of host cell and those which direct expression of the nucleotide sequence only in certain host cells (e.g., tissue-specific regulatory sequences). It will be appreciated by those skilled in the art that the design of the expression vector can depend on such factors as the choice of the host cell to be transformed and the level of expression of polypeptide desired. The expression vectors of the invention can be introduced into host cells to thereby produce polypeptides, including fusion polypeptides, encoded by nucleic acid molecules as described herein.

[0274] The recombinant expression vectors of the invention can be designed for expression of a polypeptide of the invention in prokaryotic or eukaryotic cells, e.g., bacterial cells such as E. coli, insect cells (using baculovirus expression vectors), yeast cells or mammalian cells. Suitable host cells are discussed further in Goeddel, supra. Alternatively, the recombinant expression vector can be transcribed and translated in vitro, for example using T7 promoter regulatory sequences and T7 polymerase.

[0275] Another aspect of the invention pertains to host cells into which a recombinant expression vector of the invention has been introduced. The terms “host cell” and “recombinant host cell” are used interchangeably herein. It is understood that such terms refer not only to the particular subject cell but also to the progeny or potential progeny of such a cell. Because certain modifications may occur in succeeding generations due to either mutation or environmental influences, such progeny may not, in fact, be identical to the parent cell, but are still included within the scope of the term as used herein.

[0276] A host cell can be any prokaryotic or eukaryotic cell. For example, a nucleic acid molecule of the invention can be expressed in bacterial cells (e.g., E. coli), insect cells, yeast or mammalian cells (such as Chinese hamster ovary cells (CHO) or COS cells). Other suitable host cells are known to those skilled in the art.

[0277] Vector DNA can be introduced into prokaryotic or eukaryotic cells via conventional transformation or transfection techniques. As used herein, the terms “transformation” and “transfection” are intended to refer to a variety of art-recognized techniques for introducing a foreign nucleic acid molecule (e.g., DNA) into a host cell, including calcium phosphate or calcium chloride co-precipitation, DEAE-dextran-mediated transfection, lipofection, or electroporation. Suitable methods for transforming or transfecting host cells can be found in Sambrook, et al., (supra), and other laboratory manuals.

[0278] For stable transfection of mammalian cells, it is known that, depending upon the expression vector and transfection technique used, only a small fraction of cells may integrate the foreign DNA into their genome. In order to identify and select these integrants, a gene that encodes a selectable marker (e.g., for resistance to antibiotics) is generally introduced into the host cells along with the gene of interest. Preferred selectable markers include those that confer resistance to drugs, such as G418, hygromycin and methotrexate. Nucleic acid molecules encoding a selectable marker can be introduced into a host cell on the same vector as the nucleic acid molecule of the invention or can be introduced on a separate vector. Cells stably transfected with the introduced nucleic acid molecule can be identified by drug selection (e.g., cells that have incorporated the selectable marker gene will survive, while the other cells die).

[0279] A host cell of the invention, such as a prokaryotic or eukaryotic host cell in culture can be used to produce (i.e., express) a polypeptide of the invention. Accordingly, the invention further provides methods for producing a polypeptide using the host cells of the invention. In one aspect, the method comprises culturing the host cell of invention (into which a recombinant expression vector encoding a polypeptide of the invention has been introduced) in a suitable medium such that the polypeptide is produced. In another aspect, the method further comprises isolating the polypeptide from the medium or the host cell.

[0280] The host cells of the invention can also be used to produce nonhuman transgenic animals. For example, in one aspect, a host cell of the invention is a fertilized oocyte or an embryonic stem cell into which a nucleic acid molecule of the invention has been introduced (e.g., an exogenous MAP3K9 gene, or an exogenous nucleic acid encoding a MAP3K9 polypeptide). Such host cells can then be used to create non-human transgenic animals in which exogenous nucleotide sequences have been introduced into the genome or homologous recombinant animals in which endogenous nucleotide sequences have been altered. Such animals are useful for studying the function and/or activity of the nucleotide sequence and polypeptide encoded by the sequence and for identifying and/or evaluating modulators of their activity. As used herein, a “transgenic animal” is a non-human animal, preferably a mammal, more preferably a rodent such as a rat or mouse, in which one or more of the cells of the animal include a transgene. Other examples of transgenic animals include non-human primates, sheep, dogs, cows, goats, chickens and amphibians. A transgene is exogenous DNA which is integrated into the genome of a cell from which a transgenic animal develops and which remains in the genome of the mature animal, thereby directing the expression of an encoded gene product in one or more cell types or tissues of the transgenic animal. As used herein, a “homologous recombinant animal” is a non-human animal, preferably a mammal, more preferably a mouse, in which an endogenous gene has been altered by homologous recombination between the endogenous gene and an exogenous DNA molecule introduced into a cell of the animal, e.g., an embryonic cell of the animal, prior to development of the animal.

[0281] Methods for generating transgenic animals via embryo manipulation and microinjection, particularly animals such as mice, have become conventional in the art and are described, for example, in U.S. Pat. Nos. 4,736,866 and 4,870,009, U.S. Pat. No. 4,873,191 and in Hogan, Manipulating the Mouse Embryo (Cold Spring Harbor Laboratory Press, Cold Spring Harbor, N.Y., 1986). Methods for constructing homologous recombination vectors and homologous recombinant animals are described further in Bradley, Current Opinion in BioTechnology 2:823-829 (1991) and in PCT Publication Nos. WO 90/11354, WO 91/01140, WO 92/0968, and WO 93/04169. Clones of the non-human transgenic animals described herein can also be produced according to the methods described in Wilmut et al., Nature 385:810-813 (1997) and PCT Publication Nos. WO 97/07668 and WO 97/07669.

Ribonucleic Acid (RNA) of the Invention:

[0282] In one aspect, the invention relates to methods of measuring RNA levels of the MLK kinases (e.g., MLK1) using Real-Time Quantitative PCR assay in which oligo nucleotides specific for members of the MLK kinase family (e.g., MLK1) are used to amplify reverse transcribed RNA (c-DNA) on RNA samples that are isolated from blood leukocytes or other tissue samples. The method includes obtaining a sample of cells from the patient, and determining RNA levels using sequence specific probes that hybridize to PCR products of MLK kinases (e.g., MLK1) by employing the 5′→3′ exonuclease activity of Taq DNA polymerase on RNA samples that are isolated from cells that have been exposed to specific cytokine activators that activate the JNK pathway (such as IL1b or TNFα) vs vehicle alone (i.e., no activation). In one aspect, the TaqMan probe consists of a site-specific sequence labeled with a fluorescent reporter dye and a fluorescent quencher dye wherein, during the PCR reaction, the TaqMan probe hybridizes to its complementary single strand DNA sequence within the PCR target, the final level being measured by spectrophotometry after termination of the PCR. In another aspect, MLK kinase expression (e.g., MLK1) is determined using SYBR Green as a fluorescent dye. This dye fluoresces only when bound to double-stranded DNA, i.e., when MLK kinase (e.g., MLK1) uniquely designed primers bind and allow for discrimation between different RNA splice variants. In yet another aspect the invention is directed at methods that determine the role of MAP3k9 or its pathway-related genes, by obtaining a sample of cells from patients with asthma or other respiratory or inflammatory disorders, determining RNA levels of MAP3k9 or its pathway related genes in cells exposed to pathway specific activators (such as IL1b or TNFα) or vehicle alone (no activation), and comparing them with reference RNA levels of the gene in cells isolated from subjects without asthma or other inflammatory/respiratory disorders. In another aspect, the invention relates to methods for predicting efficacy of an inhibitor drug, including obtaining a sample of cells from patients with asthma or another respiratory/inflammatory disorder, determining RNA levels of MAP3k9 or its pathway related genes in cells isolated from patients who are taking the drug compared to those who are not taking the drug. In another aspect, the invention relates to methods for predicting efficacy of an inhibitor drug, including obtaining a sample of cells from patients with asthma or other respiratory/inflammatory disorders, determining RNA levels of MAP3k9 or its pathway related genes after exposure of the cells to the inhibitor drug in vitro.

Polypeptides of the Invention

[0283] The present invention also pertains to isolated polypeptides encoded by MAP3K9 nucleic acids (“MAP3K9 polypeptides,” or “MAP3K9 proteins,” such as the protein shown in SEQ ID NO: 2, FIG. 8, FIG. 9 and NCBI accession number XM_{—}027237; (mRNA); the entire sequence being incorporated herein by reference) and fragments and variants thereof, as well as polypeptides encoded by nucleotide sequences described herein (e.g., other splicing variants). The term “polypeptide” refers to a polymer of amino acids, and not to a specific length; thus, peptides, oligopeptides and proteins are included within the definition of a polypeptide. As used herein, a polypeptide is said to be “isolated” or “purified” when it is substantially free of cellular material when it is isolated from recombinant and non-recombinant cells, or free of chemical precursors or other chemicals when it is chemically synthesized. A polypeptide, however, can be joined to another polypeptide with which it is not normally associated in a cell (e.g., in a “fusion protein”) and still be “isolated” or “purified.”

[0284] The polypeptides of the invention can be purified to homogeneity. It is understood, however, that preparations in which the polypeptide is not purified to homogeneity are useful. The critical feature is that the preparation allows for the desired function of the polypeptide, even in the presence of considerable amounts of other components. Thus, the invention encompasses various degrees of purity. In one aspect, the language “substantially free of cellular material” includes preparations of the polypeptide having less than about 30% (by dry weight) other proteins (i.e., contaminating protein), less than about 20% other proteins, less than about 10% other proteins, or less than about 5% other proteins.

[0285] When a polypeptide is recombinantly produced, it can also be substantially free of culture medium, i.e., culture medium represents less than about 20%, less than about 10%, or less than about 5% of the volume of the polypeptide preparation. The language “substantially free of chemical precursors or other chemicals” includes preparations of the polypeptide in which it is separated from chemical precursors or other chemicals that are involved in its synthesis. In one aspect, the language “substantially free of chemical precursors or other chemicals” includes preparations of the polypeptide having less than about 30% (by dry weight) chemical precursors or other chemicals, less than about 20% chemical precursors or other chemicals, less than about 10% chemical precursors or other chemicals, or less than about 5% chemical precursors or other chemicals.

[0286] In one aspect, a polypeptide of the invention comprises an amino acid sequence encoded by a nucleic acid molecule comprising a nucleotide sequence of SEQ ID NO: 1, or the complement of such a nucleic acid, or portions thereof, or a portion or polymorphic variant thereof. However, the polypeptides of the invention also encompass fragment and sequence variants. Variants include a substantially homologous polypeptide encoded by the same genetic locus in an organism, i.e., an allelic variant, as well as other splicing variants. Variants also encompass polypeptides derived from other genetic loci in an organism, but having substantial homology to a polypeptide encoded by a nucleic acid molecule comprising a nucleotide of SEQ ID NO: 1 or a complement of such a sequence, or portions thereof or polymorphic variants thereof. Variants also include polypeptides substantially homologous or identical to these polypeptides but derived from another organism, i.e., an ortholog. Variants also include polypeptides that are substantially homologous or identical to these polypeptides that are produced by chemical synthesis. Variants also include polypeptides that are substantially homologous or identical to these polypeptides that are produced by recombinant methods.

[0287] As used herein, two polypeptides (or a region of the polypeptides) are substantially homologous or identical when the amino acid sequences are at least about 45-55%, in certain aspects at least about 70-75%, and in other aspects at least about 80-85%, and in other aspects greater than about 90% or more homologous or identical. A substantially homologous amino acid sequence, according to the present invention, will be encoded by a nucleic acid molecule hybridizing to a nucleic acid of the invention or portion thereof or polymorphic variant thereof, under stringent conditions as more particularly described above.

[0288] The invention also encompasses polypeptides having a lower degree of identity but having sufficient similarity so as to perform one or more of the same functions performed by a polypeptide encoded by a nucleic acid molecule of the invention.

[0289] Similarity is determined by conserved amino acid substitution where a given amino acid in a polypeptide is substituted by another amino acid of like characteristics. Conservative substitutions are likely to be phenotypically silent. Typically seen as conservative substitutions are the replacements, one for another, among the aliphatic amino acids Ala, Val, Leu and Ile; interchange of the hydroxyl residues Ser and Thr, exchange of the acidic residues Asp and Glu, substitution between the amide residues Asn and Gln, exchange of the basic residues Lys and Arg and replacements among the aromatic residues Phe and Tyr. Guidance concerning which amino acid changes are likely to be phenotypically silent are found in Bowie et al., Science 247:1306-1310 (1990).

[0290] A variant polypeptide can differ in amino acid sequence by one or more substitutions, deletions, insertions, inversions, fusions, and truncations or a combination of any of these. Further, variant polypeptides can be fully functional or can lack function in one or more activities. Fully functional variants typically contain only conservative variation or variation in non-critical residues or in non-critical regions. Functional variants can also contain substitution of similar amino acids that result in no change or an insignificant change in function. Alternatively, such substitutions may positively or negatively affect function to some degree. Non-functional variants typically contain one or more non-conservative amino acid substitutions, deletions, insertions, inversions, or truncation or a substitution, insertion, inversion, or deletion in a critical residue or critical region.

[0291] Amino acids that are essential for function can be identified by methods known in the art, such as site-directed mutagenesis or alanine-scanning mutagenesis (Cunningham et al., Science 244:1082-1185 (1989)). The latter procedure introduces single alanine mutations at every residue in the molecule. The resulting mutant molecules are then tested for biological activity in vitro, or in vitro proliferative activity. Sites that are critical for polypeptide activity can also be determined by structural analysis such as crystallization, nuclear magnetic resonance or photoaffinity labeling (Smith et al., J. Mol. Biol. 224:899-904 (1992); de Vos et al., Science 255:306-312 (1992)).

[0292] The invention also includes polypeptide fragments of the polypeptides of the invention. Fragments can be derived from a polypeptide encoded by a nucleic acid molecule comprising SEQ ID NO: 1 or a complement of such a nucleic acid or other variants. However, the invention also encompasses fragments of the variants of the polypeptides described herein. As used herein, a fragment comprises at least 6 contiguous amino acids. Useful fragments include those that retain one or more of the biological activities of the polypeptide as well as fragments that can be used as an immunogen to generate polypeptide-specific antibodies.

[0293] Biologically active fragments (peptides which are, for example, 6, 9, 12, 15, 16, 20, 30, 35, 36, 37, 38, 39, 40, 50, 100 or more amino acids in length) can comprise a domain, segment, or motif that has been identified by analysis of the polypeptide sequence using well-known methods, e.g., signal peptides, extracellular domains, one or more transmembrane segments or loops, ligand binding regions, zinc finger domains, DNA binding domains, acylation sites, glycosylation sites, or phosphorylation sites.

[0294] Fragments can be discrete (not fused to other amino acids or polypeptides) or can be within a larger polypeptide. Further, several fragments can be comprised within a single larger polypeptide. In one aspect a fragment designed for expression in a host can have heterologous pre- and pro-polypeptide regions fused to the amino terminus of the polypeptide fragment and an additional region fused to the carboxyl terminus of the fragment.

[0295] The invention thus provides chimeric or fusion polypeptides. These comprise a polypeptide of the invention operatively linked to a heterologous protein or polypeptide having an amino acid sequence not substantially homologous to the polypeptide.

[0296] “Operatively linked” indicates that the polypeptide and the heterologous protein are fused in-frame. The heterologous protein can be fused to the N-terminus or C-terminus of the polypeptide. In one aspect the fusion polypeptide does not affect function of the polypeptide per se. For example, the fusion polypeptide can be a GST-fusion polypeptide in which the polypeptide sequences are fused to the C-terminus of the GST sequences. Other types of fusion polypeptides include, but are not limited to, enzymatic fusion polypeptides, for example beta-galactosidase fusions, yeast two-hybrid hybrid GAL fusions, poly-His fusions and Ig fusions. Such fusion polypeptides, particularly poly-His fusions, can facilitate the purification of recombinant polypeptide. In certain host cells (e.g., mammalian host cells), expression and/or secretion of a polypeptide can be increased using a heterologous signal sequence. Therefore, in another aspect, the fusion polypeptide contains a heterologous signal sequence at its N-terminus.

[0297] EP-A-O 464 533 discloses fusion proteins comprising various portions of immunoglobulin constant regions. The Fc is useful in therapy and diagnosis and thus results, for example, in improved pharmacokinetic properties (EP-A 0232 262). In drug discovery, for example, human proteins have been fused with Fc portions for the purpose of high-throughput screening assays to identify antagonists. Bennett et al., Journal of Molecular Recognition, 8:52-58 (1995) and Johanson et al., The Journal of Biological Chemistry, 270,16:9459-9471 (1995). Thus, this invention also encompasses soluble fusion polypeptides containing a polypeptide of the invention and various portions of the constant regions of heavy or light chains of immunoglobulins of various subclasses (IgG, IgM, IgA, IgE).

[0298] A chimeric or fusion polypeptide can be produced by standard recombinant DNA techniques. For example, DNA fragments coding for the different polypeptide sequences are ligated together in-frame in accordance with conventional techniques. In another aspect, the fusion gene can be synthesized by conventional techniques including automated DNA synthesizers. Alternatively, PCR amplification of nucleic acid fragments can be carried out using anchor primers which give rise to complementary overhangs between two consecutive nucleic acid fragments which can subsequently be annealed and re-amplified to generate a chimeric nucleic acid sequence (see Ausubel et al., Current Protocols in Molecular Biology, 1992).

[0299] Moreover, many expression vectors are commercially available that already encode a fusion moiety (e.g., a GST protein). A nucleic acid molecule encoding a polypeptide of the invention can be cloned into such an expression vector such that the fusion moiety is linked in-frame to the polypeptide.

[0300] The isolated polypeptide can be purified from cells that naturally express it, can be purified from cells that have been altered to express it (recombinant), or synthesized using known protein synthesis methods. In one aspect, the polypeptide is produced by recombinant DNA techniques. For example, a nucleic acid molecule encoding the polypeptide is cloned into an expression vector, the expression vector introduced into a host cell and the polypeptide expressed in the host cell. The polypeptide can then be isolated from the cells by an appropriate purification scheme using standard protein purification techniques.

[0301] The polypeptides of the present invention can be used to raise antibodies or to elicit an immune response. The polypeptides can also be used as a reagent, e.g., a labeled reagent, in assays to quantitatively determine levels of the polypeptide or a molecule to which it binds (e.g., a ligand) in biological fluids. The polypeptides can also be used as markers for cells or tissues in which the corresponding polypeptide is preferentially expressed, either constitutively, during tissue differentiation, or in a diseased state. The polypeptides can be used to isolate a corresponding binding agent, e.g., ligand or receptor, such as, for example, in an interaction trap assay, and to screen for peptide or small molecule antagonists or agonists of the binding interaction.

### ANTIBODIES OF THE INVENTION

[0302] Polyclonal antibodies and/or monoclonal antibodies that specifically bind one form of the gene product but not to the other form of the gene product are also provided. Antibodies are also provided which bind a portion of either the variant or the reference gene product that contains the polymorphic site or sites. The term “antibody” as used herein refers to immunoglobulin molecules and immunologically active portions of immunoglobulin molecules, i.e., molecules that contain antigen-binding sites that specifically bind an antigen. A molecule that specifically binds to a polypeptide of the invention is a molecule that binds to that polypeptide or a fragment thereof, but does not substantially bind other molecules in a sample, e.g., a biological sample, which naturally contains the polypeptide. Examples of immunologically active portions of immunoglobulin molecules include F(ab) and F(ab′)₂ fragments which can be generated by treating the antibody with an enzyme such as pepsin. The invention provides polyclonal and monoclonal antibodies that bind to a polypeptide of the invention. The term “monoclonal antibody” or “monoclonal antibody composition”, as used herein, refers to a population of antibody molecules that contain only one species of an antigen binding site capable of immunoreacting with a particular epitope of a polypeptide of the invention. A monoclonal antibody composition thus typically displays a single binding affinity for a particular polypeptide of the invention with which it immunoreacts.

[0303] Polyclonal antibodies can be prepared as described above by immunizing a suitable subject with a desired immunogen, e.g., polypeptide of the invention or a fragment thereof. The antibody titer in the immunized subject can be monitored over time by standard techniques, such as with an enzyme linked immunosorbent assay (ELISA) using immobilized polypeptide. If desired, the antibody molecules directed against the polypeptide can be isolated from the mammal (e.g., from the blood) and further purified by well-known techniques, such as protein A chromatography to obtain the IgG fraction. At an appropriate time after immunization, e.g., when the antibody titers are highest, antibody-producing cells can be obtained from the subject and used to prepare monoclonal antibodies by standard techniques, such as the hybridoma technique originally described by Kohler and Milstein, Nature 256:495-497 (1975), the human B cell hybridoma technique (Kozbor et al., Immunol. Today 4: 72 (1983)), the EBV-hybridoma technique (Cole et al., Monoclonal Antibodies and Cancer Therapy, Alan R. Liss, 1985, Inc., pp. 77-96) or trioma techniques. The technology for producing hybridomas is well known (see generally Current Protocols in Immunology (1994) Coligan et al., (eds.) John Wiley & Sons, Inc., New York, N.Y.). Briefly, an immortal cell line (typically a myeloma) is fused to lymphocytes (typically splenocytes) from a mammal immunized with an immunogen as described above, and the culture supernatants of the resulting hybridoma cells are screened to identify a hybridoma producing a monoclonal antibody that binds a polypeptide of the invention.

[0304] Any of the many well known protocols used for fusing lymphocytes and immortalized cell lines can be applied for the purpose of generating a monoclonal antibody to a polypeptide of the invention (see, e.g., Current Protocols in Immunology, supra; Galfre et al., Nature 266:55052 (1977); R. H. Kenneth, in Monoclonal Antibodies: A New Dimension In Biological Analyses, Plenum Publishing Corp., New York, N.Y. (1980); and Lerner, Yale J. Biol. Med. 54:387-402 (1981)). Moreover, the ordinarily skilled worker will appreciate that there are many variations of such methods that also would be useful.

[0305] Alternative to preparing monoclonal antibody-secreting hybridomas, a monoclonal antibody to a polypeptide of the invention can be identified and isolated by screening a recombinant combinatorial immunoglobulin library (e.g., an antibody phage display library) with the polypeptide to thereby isolate immunoglobulin library members that bind the polypeptide. Kits for generating and screening phage display libraries are commercially available (e.g., the Pharmacia Recombinant Phage Antibody System, Catalog No. 27-9400-01; and the Stratagene SurfZAP™ Phage Display Kit, Catalog No. 240612). Additionally, examples of methods and reagents particularly amenable for use in generating and screening antibody display library can be found in, for example, U.S. Pat. No. 5,223,409; PCT Publication No. WO 92/18619; PCT Publication No. WO 91/17271; PCT Publication No. WO 92/20791; PCT Publication No. WO 92/15679; PCT Publication No. WO 93/01288; PCT Publication No. WO 92/01047; PCT Publication No. WO 92/09690; PCT Publication No. WO 90/02809; Fuchs et al., Bio/Technology 9: 1370-1372 (1991); Hay et al., Hum. Antibod. Hybridomas 3:81-85 (1992); Huse et al., Science 246: 1275-1281 (1989); and Griffiths et al., EMBO J. 12:725-734 (1993).

[0306] Additionally, recombinant antibodies, such as chimeric and humanized monoclonal antibodies, comprising both human and non-human portions, which can be made using standard recombinant DNA techniques, are within the scope of the invention. Such chimeric and humanized monoclonal antibodies can be produced by recombinant DNA techniques known in the art.

[0307] In general, antibodies of the invention (e.g., a monoclonal antibody) can be used to isolate a polypeptide of the invention by standard techniques, such as affinity chromatography or immunoprecipitation. A polypeptide-specific antibody can facilitate the purification of natural polypeptide from cells and of recombinantly produced polypeptide expressed in host cells. Moreover, an antibody specific for a polypeptide of the invention can be used to detect the polypeptide (e.g., in a cellular lysate, cell supernatant, or tissue sample) in order to evaluate the abundance and pattern of expression of the polypeptide. Antibodies can be used diagnostically to monitor protein levels in tissue as part of a clinical testing procedure, e.g., to, for example, determine the efficacy of a given treatment regimen. The antibody can be coupled to a detectable substance to facilitate its detection. Examples of detectable substances include various enzymes, prosthetic groups, fluorescent materials, luminescent materials, bioluminescent materials, and radioactive materials. Examples of suitable enzymes include horseradish peroxidase, alkaline phosphatase, beta-galactosidase, or acetylcholinesterase; examples of suitable prosthetic group complexes include streptavidin/biotin and avidin/biotin; examples of suitable fluorescent materials include umbelliferone, fluorescein, fluorescein isothiocyanate, rhodamine, dichlorotriazinylamine fluorescein, dansyl chloride or phycoerythrin; an example of a luminescent material includes luminol; examples of bioluminescent materials include luciferase, luciferin, and aequorin, and examples of suitable radioactive material include ¹²⁵I, ¹³¹I, ³⁵S or ³H.

Diagnostic Assays

[0308] The nucleic acids, probes, primers, polypeptides and antibodies described herein can be used in methods of diagnosis of asthma; of a susceptibility to asthma; or of a condition associated with a MAP3K9 gene, as well as in kits (e.g., useful for diagnosis of asthma; a susceptibility to asthma; or a condition associated with a MAP3K9 gene). In one aspect, the kit comprises primers that can be used to amplify the markers of interest.

[0309] In one aspect of the invention, diagnosis of a disease or condition associated with a MAP3K9 gene (e.g., diagnosis of asthma, or of a susceptibility to asthma) is made by detecting a polymorphism in a MAP3K9 nucleic acid as described herein. The polymorphism can be a change in a MAP3K9 nucleic acid, such as the insertion or deletion of a single nucleotide, or of more than one nucleotide, resulting in a frame shift; the change of at least one nucleotide, resulting in a change in the encoded amino acid; the change of at least one nucleotide, resulting in the generation of a premature stop codon; the deletion of several nucleotides, resulting in a deletion of one or more amino acids encoded by the nucleotides; the insertion of one or several nucleotides, such as by unequal recombination or gene conversion, resulting in an interruption of the coding sequence of the gene; duplication of all or a part of the gene; transposition of all or a part of the gene; or rearrangement of all or a part of the gene. More than one such change may be present in a single gene. Such sequence changes cause a difference in the polypeptide encoded by a MAP3K9 nucleic acid. For example, if the difference is a frame shift change, the frame shift can result in a change in the encoded amino acids, and/or can result in the generation of a premature stop codon, causing generation of a truncated polypeptide. Alternatively, a polymorphism associated with a disease or condition or a susceptibility to a disease or condition associated with a MAP3K9 nucleic acid can be a synonymous alteration in one or more nucleotides (i.e., an alteration that does not result in a change in the polypeptide encoded by a MAP3K9 nucleic acid). Such a polymorphism may alter splicing sites, affect the stability or transport of mRNA, or otherwise affect the transcription or translation of the gene. A MAP3K9 nucleic acid that has any of the changes or alterations described above is referred to herein as an “altered nucleic acid.”

[0310] In a first method of diagnosing asthma or a susceptibility to asthma, or another disease or condition associated with a MAP3K9 gene, hybridization methods, such as Southern analysis, Northern analysis, or in situ hybridizations, can be used (see Current Protocols in Molecular Biology, Ausubel, F. et al., eds, John Wiley & Sons, including all supplements through 1999). For example, a biological sample (a “test sample”) from a test subject (the “test individual”) of genomic DNA, RNA, or cDNA, is obtained from an individual, such as an individual suspected of having, being susceptible to or predisposed for, or carrying a defect for, the disease or condition, or the susceptibility to the disease or condition, associated with a MAP3K9 gene (e.g., asthma). The individual can be an adult, child, or fetus. The test sample can be from any source which contains genomic DNA, such as a blood sample, sample of amniotic fluid, sample of cerebrospinal fluid, or tissue sample from skin, muscle, buccal or conjunctival mucosa, placenta, gastrointestinal tract or other organs. A test sample of DNA from fetal cells or tissue can be obtained by appropriate methods, such as by amniocentesis or chorionic villus sampling. The DNA, RNA, or cDNA sample is then examined to determine whether a polymorphism in a MAP3K9 nucleic acid is present, and/or to determine which splicing variant(s) encoded by the MAP3K9 is present. The presence of the polymorphism or splicing variant(s) can be indicated by hybridization of the gene in the genomic DNA, RNA, or cDNA to a nucleic acid probe. A “nucleic acid probe”, as used herein, can be a DNA probe or an RNA probe; the nucleic acid probe can contain, for example, at least one polymorphism in a MAP3K9 nucleic acid (e.g., as set forth in Table 2) and/or contain a nucleic acid encoding a particular splicing variant of a MAP3K9 nucleic acid. The probe can be any of the nucleic acid molecules described above (e.g., the gene or nucleic acid, a fragment, a vector comprising the gene or nucleic acid, a probe or primer, etc.).

[0311] To diagnose asthma, or a susceptibility to asthma, or another condition associated with a MAP3K9 gene, a hybridization sample is formed by contacting the test sample containing a MAP3K9 nucleic acid with at least one nucleic acid probe. A preferred probe for detecting mRNA or genomic DNA is a labeled nucleic acid probe capable of hybridizing to mRNA or genomic DNA sequences described herein. The nucleic acid probe can be, for example, a full-length nucleic acid molecule, or a portion thereof, such as an oligonucleotide of at least 15, 30, 50, 100, 250 or 500 nucleotides in length and sufficient to specifically hybridize under stringent conditions to appropriate mRNA or genomic DNA. For example, the nucleic acid probe can be all or a portion of one of SEQ ID NOs: 4-109 or the complement thereof, or a portion thereof. Other suitable probes for use in the diagnostic assays of the invention are described above (see e.g., probes and primers discussed under the heading, “Nucleic Acids of the Invention”).

[0312] The hybridization sample is maintained under conditions that are sufficient to allow specific hybridization of the nucleic acid probe to a MAP3K9 nucleic acid. “Specific hybridization”, as used herein, indicates exact hybridization (e.g., with no mismatches). Specific hybridization can be performed under high stringency conditions or moderate stringency conditions, for example, as described above. In a particularly preferred aspect, the hybridization conditions for specific hybridization are high stringency.

[0313] Specific hybridization, if present, is then detected using standard methods. If specific hybridization occurs between the nucleic acid probe and MAP3K9 nucleic acid in the test sample, then the MAP3K9 has the polymorphism, or is the splicing variant, that is present in the nucleic acid probe. More than one nucleic acid probe can also be used concurrently in this method. Specific hybridization of any one of the nucleic acid probes is indicative of a polymorphism in the MAP3K9 nucleic acid, or of the presence of a particular splicing variant encoding the MAP3K9 nucleic acid and is therefore diagnostic for a susceptibility to a disease or condition associated with a MAP3K9 nucleic acid (e.g., asthma).

[0314] In Northern analysis (see Current Protocols in Molecular Biology, Ausubel, F. et al., eds., John Wiley & Sons, supra) the hybridization methods described above are used to identify the presence of a polymorphism or a particular splicing variant, associated with a susceptibility to a disease or condition associated with a MAP3K9 gene (e.g., asthma). For Northern analysis, a test sample of RNA is obtained from the individual by appropriate means. Specific hybridization of a nucleic acid probe, as described above, to RNA from the individual is indicative of a polymorphism in a MAP3K9 nucleic acid, or of the presence of a particular splicing variant encoded by a MAP3K9 nucleic acid and is therefore diagnostic for asthma or a susceptibility to asthma or a condition associated with a MAP3K9 nucleic acid (e.g., asthma).

[0315] For representative examples of use of nucleic acid probes, see, for example, U.S. Pat. Nos. 5,288,611 and 4,851,330.

[0316] Alternatively, a peptide nucleic acid (PNA) probe can be used instead of a nucleic acid probe in the hybridization methods described above. PNA is a DNA mimic having a peptide-like, inorganic backbone, such as N-(2-aminoethyl)glycine units, with an organic base (A, G, C, T or U) attached to the glycine nitrogen via a methylene carbonyl linker (see, for example, Nielsen, P. E. et al., Bioconjugate Chemistry 5, American Chemical Society, p. 1 (1994). The PNA probe can be designed to specifically hybridize to a gene having a polymorphism associated with a susceptibility to a disease or condition associated with a MAP3K9 nucleic acid (e.g., asthma). Hybridization of the PNA probe to a MAP3K9 gene is diagnostic for asthma or a susceptibility to asthma or a condition associated with a MAP3K9 nucleic acid.

[0317] In another method of the invention, alteration analysis by restriction digestion can be used to detect an altered gene, or genes containing a polymorphism(s), if the alteration (mutation) or polymorphism in the gene results in the creation or elimination of a restriction site. A test sample containing genomic DNA is obtained from the individual. Polymerase chain reaction (PCR) can be used to amplify a MAP3K9 nucleic acid (and, if necessary, the flanking sequences) in the test sample of genomic DNA from the test individual. RFLP analysis is conducted as described (see Current Protocols in Molecular Biology, supra). The digestion pattern of the relevant DNA fragment indicates the presence or absence of the alteration or polymorphism in the MAP3K9 nucleic acid, and therefore indicates the presence or absence of asthma or the susceptibility to a disease or condition associated with a MAP3K9 nucleic acid.

[0318] Sequence analysis can also be used to detect specific polymorphisms in a MAP3K9 nucleic acid. A test sample of DNA or RNA is obtained from the test individual. PCR or other appropriate methods can be used to amplify the gene or nucleic acid, and/or its flanking sequences, if desired. The sequence of a MAP3K9 nucleic acid, or a fragment of the nucleic acid, or cDNA, or fragment of the cDNA, or mRNA, or fragment of the mRNA, is determined, using standard methods. The sequence of the nucleic acid, nucleic acid fragment, cDNA, cDNA fragment, mRNA, or mRNA fragment is compared with the known nucleic acid sequence of the gene or cDNA or mRNA, as appropriate. The presence of a polymorphism in the MAP3K9 indicates that the individual has asthma or a susceptibility to asthma.

[0319] Allele-specific oligonucleotides can also be used to detect the presence of a polymorphism in a MAP3K9 nucleic acid, through the use of dot-blot hybridization of amplified oligonucleotides with allele-specific oligonucleotide (ASO) probes (see, for example, Saiki, R. et al., Nature 324:163-166 (1986)). An “allele-specific oligonucleotide” (also referred to herein as an “allele-specific oligonucleotide probe”) is an oligonucleotide of approximately 10-50 base pairs, preferably approximately 15-30 base pairs, that specifically hybridizes to a MAP3K9 nucleic acid, and that contains a polymorphism associated with a susceptibility to a disease or condition associated with a MAP3K9 nucleic acid. An allele-specific oligonucleotide probe that is specific for particular polymorphisms in a MAP3K9 nucleic acid can be prepared, using standard methods (see Current Protocols in Molecular Biology, supra). To identify polymorphisms in the gene that are associated with a disease or condition associated with a MAP3K9 nucleic acid or a susceptibility to a disease or condition associated with a MAP3K9 nucleic acid a test sample of DNA is obtained from the individual. PCR can be used to amplify all or a fragment of a MAP3K9 nucleic acid and its flanking sequences. The DNA containing the amplified MAP3K9 nucleic acid (or fragment of the gene or nucleic acid) is dot-blotted, using standard methods (see Current Protocols in Molecular Biology, supra), and the blot is contacted with the oligonucleotide probe. The presence of specific hybridization of the probe to the amplified MAP3K9 nucleic acid is then detected. Hybridization of an allele-specific oligonucleotide probe to DNA from the individual is indicative of a polymorphism in the MAP3K9 nucleic acid, and is therefore indicative of a disease or condition associated with a MAP3K9 nucleic acid or susceptibility to a disease or condition associated with a MAP3K9 nucleic acid (e.g., asthma).

[0320] The invention further provides allele-specific oligonucleotides that hybridize to the reference or variant allele of a gene or nucleic acid comprising a single nucleotide polymorphism or to the complement thereof. These oligonucleotides can be probes or primers.

[0321] An allele-specific primer hybridizes to a site on target DNA overlapping a polymorphism and only primes amplification of an allelic form to which the primer exhibits perfect complementarity. See Gibbs, Nucleic Acid Res. 17, 2427-2448 (1989). This primer is used in conjunction with a second primer, which hybridizes at a distal site. Amplification proceeds from the two primers, resulting in a detectable product, which indicates the particular allelic form is present. A control is usually performed with a second pair of primers, one of which shows a single base mismatch at the polymorphic site and the other of which exhibits perfect complementarity to a distal site. The single-base mismatch prevents amplification and no detectable product is formed. The method works best when the mismatch is included in the 3′-most position of the oligonucleotide aligned with the polymorphism because this position is most destabilizing to elongation from the primer (see, e.g., WO 93/22456).

[0322] With the addition of such analogs as locked nucleic acids (LNAs), the size of primers and probes can be reduced to as few as 8 bases. LNAs are a novel class of bicyclic DNA analogs in which the 2′ and 4′ positions in the furanose ring are joined via an O-methylene (oxy-LNA), S-methylene (thio-LNA), or amino methylene (amino-LNA) moiety. Common to all of these LNA variants is an affinity toward complementary nucleic acids, which is by far the highest reported for a DNA analog. For example, particular all oxy-LNA nonamers have been shown to have melting temperatures of 64° C. and 74° C. when in complex with complementary DNA or RNA, respectively, as oposed to 28° C. for both DNA and RNA for the corresponding DNA nonamer. Substantial increases in Tₘ are also obtained when LNA monomers are used in combination with standard DNA or RNA monomers. For primers and probes, depending on where the LNA monomers are included (e.g., the 3′ end, the 5′end, or in the middle), the Tₘ could be increased considerably.

[0323] In another aspect, arrays of oligonucleotide probes that are complementary to target nucleic acid sequence segments from an individual, can be used to identify polymorphisms in a MAP3K9 nucleic acid. For example, in one aspect, an oligonucleotide array can be used. Oligonucleotide arrays typically comprise a plurality of different oligonucleotide probes that are coupled to a surface of a substrate in different known locations. These oligonucleotide arrays, also described as “Genechips™,” have been generally described in the art, for example, U.S. Pat. No. 5,143,854 and PCT patent publication Nos. WO 90/15070 and 92/10092. These arrays can generally be produced using mechanical synthesis methods or light directed synthesis methods that incorporate a combination of photolithographic methods and solid phase oligonucleotide synthesis methods. See Fodor et al., Science 251:767-777 (1991), Pirrung et al., U.S. Pat. No. 5,143,854 (see also PCT Application No. WO 90/15070) and Fodor et al., PCT Publication No. WO 92/10092 and U.S. Pat. No. 5,424,186, the entire teachings of each of which are incorporated by reference herein. Techniques for the synthesis of these arrays using mechanical synthesis methods are described in, e.g., U.S. Pat. No. 5,384,261; the entire teachings of which are incorporated by reference herein. In another example, linear arrays can be utilized.

[0324] Once an oligonucleotide array is prepared, a nucleic acid of interest is hybridized with the array and scanned for polymorphisms. Hybridization and scanning are generally carried out by methods described herein and also in, e.g., published PCT Application Nos. WO 92/10092 and WO 95/11995, and U.S. Pat. No. 5,424,186, the entire teachings of which are incorporated by reference herein. In brief, a target nucleic acid sequence that includes one or more previously identified polymorphic markers is amplified by well-known amplification techniques, e.g., PCR. Typically, this involves the use of primer sequences that are complementary to the two strands of the target sequence both upstream and downstream from the polymorphism. Asymmetric PCR techniques may also be used. Amplified target, generally incorporating a label, is then hybridized with the array under appropriate conditions. Upon completion of hybridization and washing of the array, the array is scanned to determine the position on the array to which the target sequence hybridizes. The hybridization data obtained from the scan is typically in the form of fluorescence intensities as a function of location on the array.

[0325] Although primarily described in terms of a single detection block, e.g., for detecting a single polymorphism, arrays can include multiple detection blocks, and thus be capable of analyzing multiple, specific polymorphisms. In alternative aspects,it will generally be understood that detection blocks may be grouped within a single array or in multiple, separate arrays so that varying, optimal conditions may be used during the hybridization of the target to the array. For example, it may often be desirable to provide for the detection of those polymorphisms that fall within G-C rich stretches of a genomic sequence, separately from those falling in A-T rich segments. This allows for the separate optimization of hybridization conditions for each situation.

[0326] Additional uses of oligonucleotide arrays for polymorphism detection can be found, for example, in U.S. Pat. Nos. 5,858,659 and 5,837,832, the entire teachings of which are incorporated by reference herein. Other methods of nucleic acid analysis can be used to detect polymorphisms in a asthma gene or variants encoding by a asthma gene. Representative methods include direct manual sequencing (Church and Gilbert, Proc. Natl. Acad. Sci. USA 81:1991-1995 (1988); Sanger, F. et al., Proc. Natl. Acad. Sci. USA 74:5463-5467 (1977); Beavis et al., U.S. Pat. No. 5,288,644); automated fluorescent sequencing; single-stranded conformation polymorphism assays (SSCP); clamped denaturing gel electrophoresis (CDGE); denaturing gradient gel electrophoresis (DGGE) (Sheffield, V. C. et al., Proc. Natl. Acad. Sci. USA 86:232-236 (1989)), mobility shift analysis (Orita, M. et al., Proc. Natl. Acad. Sci. USA 86:2766-2770 (1989)), restriction enzyme analysis (Flavell et al., Cell 15:25 (1978); Geever, et al., Proc. Natl. Acad. Sci. USA 78:5081 (1981)); heteroduplex analysis; chemical mismatch cleavage (CMC) (Cotton et al., Proc. Natl. Acad. Sci. USA 85:4397-4401 (1985)); RNase protection assays (Myers, R. M. et al., Science 230:1242 (1985)); use of polypeptides which recognize nucleotide mismatches, such as E. coli mutS protein; allele-specific PCR, for example.

[0327] In one aspect of the invention, diagnosis of a disease or condition associated with a MAP3K9 nucleic acid (e.g., asthma) or a susceptibility to a disease or condition associated with a MAP3K9 nucleic acid (e.g., asthma) can also be made by expression analysis by quantitative PCR (kinetic thermal cycling). This technique, utilizing TaqMan® assays, can assess the presence of an alteration in the expression or composition of the polypeptide encoded by a MAP3K9 nucleic acid or splicing variants encoded by a MAP3K9 nucleic acid. TaqMan® probes can also be used to allow the identification of polymorphisms and whether a patient is homozygous or heterozygous. Further, the expression of the variants can be quantified as physically or functionally different.

[0328] In another aspect of the invention, diagnosis of asthma or a susceptibility to asthma or a condition associated with a MAP3K9 gene) can be made by examining expression and/or composition of a MAP3K9 polypeptide, by a variety of methods, including enzyme linked immunosorbent assays (ELISAs), Western blots, immunoprecipitations and immunofluorescence. A test sample from an individual is assessed for the presence of an alteration in the expression and/or an alteration in composition of the polypeptide encoded by a MAP3K9 nucleic acid, or for the presence of a particular variant encoded by a MAP3K9 nucleic acid. An alteration in expression of a polypeptide encoded by a MAP3K9 nucleic acid can be, for example, an alteration in the quantitative polypeptide expression (i.e., the amount of polypeptide produced); an alteration in the composition of a polypeptide encoded by a MAP3K9 nucleic acid is an alteration in the qualitative polypeptide expression (e.g., expression of an altered MAP3K9 polypeptide or of a different splicing variant). In a preferred aspect, diagnosis of the disease or condition associated with MAP3K9 nucleic acid or a susceptibility to a disease or condition associated with a MAP3K9 nucleic acid is made by detecting a particular splicing variant encoded by that MAP3K9 nucleic acid, or a particular pattern of splicing variants.

[0329] Both such alterations (quantitative and qualitative) can also be present. The term “alteration” in the polypeptide expression or composition, as used herein, refers to an alteration in expression or composition in a test sample, as compared with the expression or composition of polypeptide by a MAP3K9 nucleic acid in a control sample. A control sample is a sample that corresponds to the test sample (e.g., is from the same type of cells), and is from an individual who is not affected by a susceptibility to a disease or condition associated with a MAP3K9 nucleic acid. An alteration in the expression or composition of the polypeptide in the test sample, as compared with the control sample, is indicative of a susceptibility to a disease or condition associated with a MAP3K9 nucleic acid. Similarly, the presence of one or more different splicing variants in the test sample, or the presence of significantly different amounts of different splicing variants in the test sample, as compared with the control sample, is indicative of a disease or condition associated with a MAP3K9 nucleic acid or a susceptibility to a disease or condition associated with a MAP3K9 nucleic acid. Various means of examining expression or composition of the polypeptide encoded by a MAP3K9 nucleic acid can be used, including: spectroscopy, colorimetry, electrophoresis, isoelectric focusing, and immunoassays (e.g., David et al., U.S. Pat. No. 4,376,110) such as immunoblotting (see also Current Protocols in Molecular Biology, particularly Chapter 10). For example, in one aspect, an antibody capable of binding to the polypeptide (e.g., as described above), preferably an antibody with a detectable label, can be used. Antibodies can be polyclonal, or more preferably, monoclonal. An intact antibody, or a fragment thereof (e.g., Fab or F(ab′)₂) can be used. The term “labeled”, with regard to the probe or antibody, is intended to encompass direct labeling of the probe or antibody by coupling (i.e., physically linking) a detectable substance to the probe or antibody, as well as indirect labeling of the probe or antibody by reactivity with another reagent that is directly labeled. Examples of indirect labeling include detection of a primary antibody using a fluorescently labeled secondary antibody and end-labeling a DNA probe with biotin such that it can be detected with fluorescently labeled streptavidin.

[0330] Western blotting analysis, using an antibody as described above that specifically binds to a polypeptide encoded by an altered MAP3K9 nucleic acid or an antibody that specifically binds to a polypeptide encoded by a non-altered nucleic acid, or an antibody that specifically binds to a particular splicing variant encoded by a nucleic acid, can be used to identify the presence in a test sample of a particular splicing variant or of a polypeptide encoded by a polymorphic or altered MAP3K9 nucleic acid, or the absence in a test sample of a particular splicing variant or of a polypeptide encoded by a non-polymorphic or non-altered nucleic acid. The presence of a polypeptide encoded by a polymorphic or altered nucleic acid, or the absence of a polypeptide encoded by a non-polymorphic or non-altered nucleic acid, is diagnostic for a disease or condition associated with a MAP3K9 nucleic acid or a susceptibility to a disease or condition associated with a MAP3K9 nucleic acid (e.g., asthma), as is the presence (or absence) of particular splicing variants encoded by the MAP3K9 nucleic acid.

[0331] In one aspect of this method, the level or amount of polypeptide encoded by a MAP3K9 nucleic acid in a test sample is compared with the level or amount of the polypeptide encoded by the MAP3K9 in a control sample. A level or amount of the polypeptide in the test sample that is higher or lower than the level or amount of the polypeptide in the control sample, such that the difference is statistically significant, is indicative of an alteration in the expression of the polypeptide encoded by the MAP3K9 nucleic acid, and is diagnostic for a disease or condition associated with a MAP3K9 nucleic acid or a susceptibility to a disease or condition associated with that MAP3K9 nucleic acid (e.g., asthma). Alternatively, the composition of the polypeptide encoded by a MAP3K9 nucleic acid in a test sample is compared with the composition of the polypeptide encoded by the MAP3K9 nucleic acid in a control sample (e.g., the presence of different splicing variants). A difference in the composition of the polypeptide in the test sample, as compared with the composition of the polypeptide in the control sample, is diagnostic for a disease or condition associated with a MAP3K9 nucleic acid or a susceptibility to a disease or condition associated with that MAP3K9 nucleic acid (e.g., asthma). In another aspect, both the level or amount and the composition of the polypeptide can be assessed in the test sample and in the control sample. A difference in the amount or level of the polypeptide in the test sample, compared to the control sample; a difference in composition in the test sample, compared to the control sample; or both a difference in the amount or level, and a difference in the composition, is indicative of a disease or condition associated with a MAP3K9 nucleic acid or a susceptibility to a disease or condition associated with that MAP3K9 nucleic acid.

[0332] The invention further pertains to a method for the diagnosis or identification of a susceptibility to asthma in an individual, by identifying an at-risk haplotype (e.g., a haplotype comprising a MAP3K9 nucleic acid). The MAP3K9-associated haplotypes, e.g., those described in the Example section, describe a set of genetic markers (“alleles”). In a certain aspect, the haplotype can comprise one or more alleles, two or more alleles, three or more alleles, four or more alleles, or five or more alleles. The genetic markers are particular “alleles” at “polymorphic sites” associated with MAP3K9. A nucleotide position at which more than one sequence is possible in a population (either a natural population or a synthetic population, e.g., a library of synthetic molecules), is referred to herein as a “polymorphic site”. Where a polymorphic site is a single nucleotide in length, the site is referred to as a single nucleotide polymorphism (“SNP”). For example, if at a particular chromosomal location, one member of a population has an adenine and another member of the population has a thymine at the same position, then this position is a polymorphic site, and, more specifically, the polymorphic site is a SNP. Polymorphic sites can allow for differences in sequences based on substitutions, insertions or deletions. Each version of the sequence with respect to the polymorphic site is referred to herein as an “allele” of the polymorphic site. Thus, in the previous example, the SNP allows for both an adenine allele and a thymine allele.

[0333] Typically, a reference sequence is referred to for a particular sequence. Alleles that differ from the reference are referred to as “variant” alleles. For example, the reference MAP3K9 sequence is described herein by SEQ ID NO: 1. The term, “variant MAP3K9”, as used herein, refers to a sequence that differs from SEQ ID NO: 1 but is otherwise substantially similar. The genetic markers that make up the haplotypes described herein are MAP3K9 variants. The variants of MAP3K9 that are used to determine the haplotypes disclosed herein of the present invention are associated with asthma or a susceptibility to asthma.

[0334] Additional variants can include changes that affect a polypeptide, e.g., the MAP3K9 polypeptide. These sequence differences, when compared to a reference nucleotide sequence, can include the insertion or deletion of a single nucleotide, or of more than one nucleotide, resulting in a frame shift; the change of at least one nucleotide, resulting in a change in the encoded amino acid; the change of at least one nucleotide, resulting in the generation of a premature stop codon; the deletion of several nucleotides, resulting in a deletion of one or more amino acids encoded by the nucleotides; the insertion of one or several nucleotides, such as by unequal recombination or gene conversion, resulting in an interruption of the coding sequence of a reading frame; duplication of all or a part of a sequence; transposition; or a rearrangement of a nucleotide sequence, as described in detail above. Such sequence changes alter the polypeptide encoded by a MAP3K9 nucleic acid. For example, if the change in the nucleic acid sequence causes a frame shift, the frame shift can result in a change in the encoded amino acids, and/or can result in the generation of a premature stop codon, causing generation of a truncated polypeptide. Alternatively, a polymorphism associated with asthma or a susceptibility to asthma can be a synonymous change in one or more nucleotides (i.e., a change that does not result in a change in the amino acid sequence). Such a polymorphism can, for example, alter splice sites, affect the stability or transport of mRNA, or otherwise affect the transcription or translation of the polypeptide. The polypeptide encoded by the reference nucleotide sequence is the “reference” polypeptide with a particular reference amino acid sequence, and polypeptides encoded by variant alleles are referred to as “variant” polypeptides with variant amino acid sequences.

[0335] Haplotypes are a combination of genetic markers, e.g., particular alleles at polymorphic sites. The haplotypes described herein, e.g., having markers such as those shown herein, are found more frequently in individuals with asthma than in individuals without asthma. Therefore, these haplotypes have predictive value for detecting asthma or a susceptibility to asthma in an individual. The haplotypes described herein are a combination of various genetic markers, e.g., SNPs and microsatellites. Therefore, detecting haplotypes can be accomplished by methods known in the art for detecting sequences at polymorphic sites, such as the methods described above.

RNA Expression Levels:

[0336] In one aspect, the invention relates to methods of measuring RNA levels of the MLK kinases (e.g., MLK1) using Real-Time Quantitative PCR. The method includes obtaining a sample of cells from the patient, and determining RNA expression levels using sequence specific probes that hybridize to PCR products of MLK kinases (e.g., MLK1) on RNA samples that are isolated from cells that have been exposed to specific cytokine activators that activate the JNK pathway (such as IL1b or TNFα) vs vehicle alone (i.e., no activation). In another aspect the invention is directed at methods that determine the role of MAP3k9 or its pathway-related genes, by obtaining a sample of cells from patients with asthma or other respiratory or inflammatory disorders, determining RNA levels of MAP3k9 or its pathway related genes in cells exposed to pathway specific activators (such as IL1b or TNFα) or vehicle alone (no activation), and comparing them with reference RNA levels of the gene in cells isolated from subjects without asthma or other inflammatory/respiratory disorders. In another aspect, the invention relates to methods for predicting efficacy of an inhibitor drug, including obtaining a sample of cells from patients with asthma or another respiratory/inflammatory disorder, determining RNA levels of MAP3k9 or its pathway related genes in cells isolated from patients who are taking the drug compared to those who are not taking the drug. In another aspect, the invention relates to methods for predicting efficacy of an inhibitor drug, including obtaining a sample of cells from patients with asthma or other respiratory/inflammatory disorders, determining RNA levels of MAP3k9 or its pathway related genes after exposure of the cells to the inhibitor drug in vitro.

Screening Assays and Agents Identified Thereby

[0337] The invention provides methods (also referred to herein as “screening assays”) for identifying the presence of a nucleotide that hybridizes to a nucleic acid of the invention, as well as for identifying the presence of a polypeptide encoded by a nucleic acid of the invention. In one aspect, the presence (or absence) of a nucleic acid molecule of interest (e.g., a nucleic acid that has significant homology with a nucleic acid of the invention) in a sample can be assessed by contacting the sample with a nucleic acid comprising a nucleic acid of the invention under stringent conditions as described above, and then assessing the sample for the presence (or absence) of hybridization. In one aspect, high stringency conditions are conditions appropriate for selective hybridization. In another aspect, a sample containing the nucleic acid molecule of interest is contacted with a nucleic acid containing a contiguous nucleotide sequence (e.g., a primer or a probe as described above) that is at least partially complementary to a part of the nucleic acid molecule of interest (e.g., a MAP3K9 nucleic acid), and the contacted sample is assessed for the presence or absence of hybridization. In another aspect, the nucleic acid containing a contiguous nucleotide sequence is completely complementary to a part of the nucleic acid molecule of interest.

[0338] In any of these aspects, all or a portion of the nucleic acid of interest can be subjected to amplification prior to performing the hybridization.

[0339] In another aspect, the presence (or absence) of a polypeptide of interest, such as a polypeptide of the invention or a fragment or variant thereof, in a sample can be assessed by contacting the sample with an antibody that specifically hybridizes to the polypeptide of interest (e.g., an antibody such as those described above), and then assessing the sample for the presence (or absence) of binding of the antibody to the polypeptide of interest.

[0340] In another aspect, the invention provides methods for identifying agents (e.g., fusion proteins, polypeptides, peptidomimetics, prodrugs, receptors, binding agents, antibodies, small molecules or other drugs, or ribozymes) that alter (e.g., increase or decrease) the activity of the polypeptides described herein, or which otherwise interact with the polypeptides herein. For example, such agents can be agents which bind to polypeptides described herein (e.g., MAP3K9 binding agents); which have a stimulatory or inhibitory effect on, for example, activity of polypeptides of the invention; or which change (e.g., enhance or inhibit) the ability of the polypeptides of the invention to interact with MAP3K9 binding agents (e.g., receptors or other binding agents); or which alter posttranslational processing of the MAP3K9 polypeptide (e.g., agents that alter proteolytic processing to direct the polypeptide from where it is normally synthesized to another location in the cell, such as the cell surface; agents that alter proteolytic processing such that more polypeptide is released from the cell, etc.

[0341] In one aspect, the invention provides assays for screening candidate or test agents that bind to or modulate the activity of polypeptides described herein (or biologically active portion(s) thereof), as well as agents identifiable by the assays. Test agents can be obtained using any of the numerous approaches in combinatorial library methods known in the art, including: biological libraries; spatially addressable parallel solid phase or solution phase libraries; synthetic library methods requiring deconvolution; the ‘one-bead one-compound’ library method; and synthetic library methods using affinity chromatography selection. The biological library approach is limited to polypeptide libraries, while the other four approaches are applicable to polypeptide, non-peptide oligomer or small molecule libraries of compounds (Lam, K. S., Anticancer Drug Des. 12:145 (1997)).

[0342] In one aspect, to identify agents which alter the activity of a MAP3K9 polypeptide, a cell, cell lysate, or solution containing or expressing a MAP3K9 polypeptide, or another splicing variant encoded by a MAP3K9 gene or a fragment or derivative thereof (as described above), can be contacted with an agent to be tested; alternatively, the polypeptide can be contacted directly with the agent to be tested. The level (amount) of MAP3K9 activity is assessed (e.g., the level (amount) of MAP3K9 activity is measured, either directly or indirectly), and is compared with the level of activity in a control (i.e., the level of activity of the MAP3K9 polypeptide or active fragment or derivative thereof in the absence of the agent to be tested). If the level of the activity in the presence of the agent differs, by an amount that is statistically significant, from the level of the activity in the absence of the agent, then the agent is an agent that alters the activity of a MAP3K9 polypeptide. An increase in the level of MAP3K9 activity relative to a control sample indicates that the agent is an agent that enhances (is an agonist of) MAP3K9 activity. Similarly, a decrease in the level of MAP3K9 activity relative to a control indicates that the agent is an agent that inhibits (is an antagonist of) MAP3K9 activity. In another aspect, the level of activity of a MAP3K9 polypeptide or derivative or fragment thereof in the presence of the agent to be tested, is compared with a control level that has previously been established. A level of the activity in the presence of the agent that differs from the control level by an amount that is statistically significant indicates that the agent alters MAP3K9 activity.

[0343] The present invention also relates to an assay for identifying agents which alter the expression of a MAP3K9 nucleic acid (e.g., antisense nucleic acids, fusion proteins, polypeptides, peptidomimetics, prodrugs, receptors, binding agents, antibodies, small molecules or other drugs, or ribozymes) which alter (e.g., increase or decrease) expression (e.g., transcription or translation) of the gene or which otherwise interact with the nucleic acids described herein, as well as agents identifiable by the assays. For example, a solution containing a nucleic acid encoding a MAP3K9 polypeptide (e.g., a MAP3K9 gene or nucleic acid) can be contacted with an agent to be tested. The solution can comprise, for example, cells containing the nucleic acid or cell lysate containing the nucleic acid; alternatively, the solution can be another solution that comprises elements necessary for transcription/translation of the nucleic acid. Cells not suspended in solution can also be employed, if desired. The level and/or pattern of MAP3K9 expression (e.g., the level and/or pattern of mRNA or of protein expressed, such as the level and/or pattern of different splicing variants) is assessed, and is compared with the level and/or pattern of expression in a control (i.e., the level and/or pattern of the MAP3K9 expression in the absence of the agent to be tested). If the level and/or pattern in the presence of the agent differs by an amount or in a manner that is statistically significant, from the level and/or pattern in the absence of the agent, then the agent is an agent that alters the expression of a asthma gene. Enhancement of MAP3K9 expression indicates that the agent is an agonist of MAP3K9 activity. Similarly, inhibition of MAP3K9 expression indicates that the agent is an antagonist of MAP3K9 activity. In another aspect, the level and/or pattern of MAP3K9 polypeptide(s) (e.g., different splicing variants) in the presence of the agent to be tested, is compared with a control level and/or pattern that have previously been established. A level and/or pattern in the presence of the agent that differs from the control level and/or pattern by an amount or in a manner that is statistically significant indicates that the agent alters MAP3K9 expression.

[0344] In another aspect of the invention, agents which alter the expression of a MAP3K9 nucleic acid or which otherwise interact with the nucleic acids described herein, can be identified using a cell, cell lysate, or solution containing a nucleic acid encoding the promoter region of the MAP3K9 gene or nucleic acid operably linked to a reporter gene. After contact with an agent to be tested, the level of expression of the reporter gene (e.g., the level of mRNA or of protein expressed) is assessed, and is compared with the level of expression in a control (i.e., the level of the expression of the reporter gene in the absence of the agent to be tested). If the level in the presence of the agent differs, by an amount or in a manner that is statistically significant, from the level in the absence of the agent, then the agent is an agent that alters the expression of the MAP3K9, as indicated by its ability to alter expression of a gene that is operably linked to the MAP3K9 gene promoter. Enhancement of the expression of the reporter indicates that the agent is an agonist of MAP3K9 activity. Similarly, inhibition of the expression of the reporter indicates that the agent is an antagonist of MAP3K9 activity. In another aspect, the level of expression of the reporter in the presence of the agent to be tested is compared with a control level that has previously been established. A level in the presence of the agent that differs from the control level by an amount or in a manner that is statistically significant indicates that the agent alters expression.

[0345] Agents which alter the amounts of different splicing variants encoded by a MAP3K9 nucleic acid (e.g., an agent which enhances activity of a first splicing variant, and which inhibits activity of a second splicing variant), as well as agents which are agonists of activity of a first splicing variant and antagonists of activity of a second splicing variant, can easily be identified using these methods described above.

[0346] In other aspects of the invention, assays can be used to assess the impact of a test agent on the activity of a polypeptide in relation to a MAP3K9 binding agent. For example, a cell that expresses a compound that interacts with a MAP3K9 polypeptide (herein referred to as a “MAP3K9 binding agent”, which can be a polypeptide or other molecule that interacts with a MAP3K9 polypeptide, such as a receptor) is contacted with a MAP3K9 in the presence of a test agent, and the ability of the test agent to alter the interaction between the MAP3K9 and the MAP3K9 binding agent is determined. Alternatively, a cell lysate or a solution containing the MAP3K9 binding agent, can be used. An agent that binds to the MAP3K9 or the MAP3K9 binding agent can alter the interaction by interfering with, or enhancing the ability of the MAP3K9 to bind to, associate with, or otherwise interact with the MAP3K9 binding agent. Determining the ability of the test agent to bind to a MAP3K9 nucleic acid or a MAP3K9 binding agent can be accomplished, for example, by coupling the test agent with a radioisotope or enzymatic label such that binding of the test agent to the polypeptide can be determined by detecting the labeled with ¹²⁵I, ³⁵S, ¹⁴C or ³H, either directly or indirectly, and the radioisotope detected by direct counting of radioemmission or by scintillation counting. Alternatively, test agents can be enzymatically labeled with, for example, horseradish peroxidase, alkaline phosphatase, or luciferase, and the enzymatic label detected by determination of conversion of an appropriate substrate to product. It is also within the scope of this invention to determine the ability of a test agent to interact with the polypeptide without the labeling of any of the interactants. For example, a microphysiometer can be used to detect the interaction of a test agent with a MAP3K9 polypeptide or a MAP3K9 binding agent without the labeling of either the test agent, MAP3K9 polypeptide, or the MAP3K9 binding agent. McConnell, H. M. et al., Science 257:1906-1912 (1992). As used herein, a “microphysiometer” (e.g., Cytosensor™) is an analytical instrument that measures the rate at which a cell acidifies its environment using a light-addressable potentiometric sensor (LAPS). Changes in this acidification rate can be used as an indicator of the interaction between ligand and polypeptide.

[0347] Thus, these receptors can be used to screen for compounds that are agonists or antagonists, for use in treating a susceptibility to a disease or condition associated with a MAP3K9 gene or nucleic acid, or for studying a susceptibility to a disease or condition associated with a MAP3K9 (e.g., asthma). Drugs could be designed to regulate MAP3K9 activation that in turn can be used to regulate signaling pathways and transcription events of genes downstream.

[0348] In another aspect of the invention, assays can be used to identify polypeptides that interact with one or more MAP3K9 polypeptides, as described herein. For example, a yeast two-hybrid system such as that described by Fields and Song (Fields, S. and Song, O., Nature 340:245-246 (1989)) can be used to identify polypeptides that interact with one or more MAP3K9 polypeptides. In such a yeast two-hybrid system, vectors are constructed based on the flexibility of a transcription factor that has two functional domains (a DNA binding domain and a transcription activation domain). If the two domains are separated but fused to two different proteins that interact with one another, transcriptional activation can be achieved, and transcription of specific markers (e.g., nutritional markers such as His and Ade, or color markers such as lacZ) can be used to identify the presence of interaction and transcriptional activation. For example, in the methods of the invention, a first vector is used which includes a nucleic acid encoding a DNA binding domain and also a MAP3K9 polypeptide, splicing variant, or fragment or derivative thereof, and a second vector is used which includes a nucleic acid encoding a transcription activation domain and also a nucleic acid encoding a polypeptide which potentially may interact with the MAP3K9 polypeptide, splicing variant, or fragment or derivative thereof (e.g., a MAP3K9 polypeptide binding agent or receptor). Incubation of yeast containing the first vector and the second vector under appropriate conditions (e.g., mating conditions such as used in the Matchmaker™ system from Clontech (Palo Alto, Calif., USA)) allows identification of colonies that express the markers of interest. These colonies can be examined to identify the polypeptide(s) that interact with the MAP3K9 polypeptide or fragment or derivative thereof. Such polypeptides may be useful as agents that alter the activity of expression of a MAP3K9 polypeptide, as described above.

[0349] In more than one aspect of the above assay methods of the present invention, it may be desirable to immobilize either the MAP3K9 gene or nucleic acid, the MAP3K9 polypeptide, the MAP3K9 binding agent, or other components of the assay on a solid support, in order to facilitate separation of complexed from uncomplexed forms of one or both of the polypeptides, as well as to accommodate automation of the assay. Binding of a test agent to the polypeptide, or interaction of the polypeptide with a binding agent in the presence and absence of a test agent, can be accomplished in any vessel suitable for containing the reactants. Examples of such vessels include microtitre plates, test tubes, and micro-centrifuge tubes. In one aspect, a fusion protein (e.g., a glutathione-S-transferase fusion protein) can be provided which adds a domain that allows a MAP3K9 nucleic acid, MAP3K9 polypeptide, or a MAP3K9 binding agent to be bound to a matrix or other solid support.

[0350] In another aspect, modulators of expression of nucleic acid molecules of the invention are identified in a method wherein a cell, cell lysate, or solution containing a MAP3K9 nucleic acid is contacted with a test agent and the expression of appropriate mRNA or polypeptide (e.g., splicing variant(s)) in the cell, cell lysate, or solution, is determined. The level of expression of appropriate mRNA or polypeptide(s) in the presence of the test agent is compared to the level of expression of mRNA or polypeptide(s) in the absence of the test agent. The test agent can then be identified as a modulator of expression based on this comparison. For example, when expression of mRNA or polypeptide is greater (statistically significantly greater) in the presence of the test agent than in its absence, the test agent is identified as a stimulator or enhancer of the mRNA or polypeptide expression. Alternatively, when expression of the mRNA or polypeptide is less (statistically significantly less) in the presence of the test agent than in its absence, the test agent is identified as an inhibitor of the mRNA or polypeptide expression. The level of mRNA or polypeptide expression in the cells can be determined by methods described herein for detecting mRNA or polypeptide.

[0351] This invention further pertains to novel agents identified by the above-described screening assays. Accordingly, it is within the scope of this invention to further use an agent identified as described herein in an appropriate animal model. For example, an agent identified as described herein (e.g., a test agent that is a modulating agent, an antisense nucleic acid molecule, a specific antibody, or a polypeptide-binding agent) can be used in an animal model to determine the efficacy, toxicity, or side effects of treatment with such an agent. Alternatively, an agent identified as described herein can be used in an animal model to determine the mechanism of action of such an agent.

[0352] Furthermore, this invention pertains to uses of novel agents identified by the above-described screening assays for treatments as described herein. In addition, an agent identified as described herein can be used to alter activity of a polypeptide encoded by a MAP3K9 nucleic acid, or to alter expression of a MAP3K9 nucleic acid, by contacting the polypeptide or the nucleic acid (or contacting a cell comprising the polypeptide or the nucleic acid) with the agent identified as described herein.

Nucleic Acid Pharmaceutical Compositions

[0353] The present invention also pertains to pharmaceutical compositions comprising nucleic acids described herein, particularly nucleotides encoding the polypeptides described herein (e.g., a MAP3K9 polypeptide); comprising polypeptides described herein and/or comprising other splicing variants encoded by a MAP3K9 nucleic acid; and/or an agent that alters (e.g., enhances or inhibits) MAP3K9 nucleic acid expression or MAP3K9 polypeptide activity as described herein. For instance, a polypeptide, protein (e.g., a MAP3K9 nucleic acid receptor), an agent that alters MAP3K9 nucleic acid expression, or a MAP3K9 binding agent or binding partner, fragment, fusion protein or pro-drug thereof, or a nucleotide or nucleic acid construct (vector) comprising a nucleotide of the present invention, or an agent that alters MAP3K9 polypeptide activity, can be formulated with a physiologically acceptable carrier or excipient to prepare a pharmaceutical composition. The carrier and composition can be sterile. The formulation should suit the mode of administration.

[0354] Suitable pharmaceutically acceptable carriers include but are not limited to water, salt solutions (e.g., NaCl), saline, buffered saline, alcohols, glycerol, ethanol, gum arabic, vegetable oils, benzyl alcohols, polyethylene glycols, gelatin, carbohydrates such as lactose, amylose or starch, dextrose, magnesium stearate, talc, silicic acid, viscous paraffin, perfume oil, fatty acid esters, hydroxymethylcellulose, polyvinyl pyrolidone, etc., as well as combinations thereof. The pharmaceutical preparations can, if desired, be mixed with auxiliary agents, e.g., lubricants, preservatives, stabilizers, wetting agents, emulsifiers, salts for influencing osmotic pressure, buffers, coloring, flavoring and/or aromatic substances and the like which do not deleteriously react with the active agents.

[0355] The composition, if desired, can also contain minor amounts of wetting or emulsifying agents, or pH buffering agents. The composition can be a liquid solution, suspension, emulsion, tablet, pill, capsule, sustained release formulation, or powder. The composition can be formulated as a suppository, with traditional binders and carriers such as triglycerides. Oral formulation can include standard carriers such as pharmaceutical grades of mannitol, lactose, starch, magnesium stearate, polyvinyl pyrollidone, sodium saccharine, cellulose, magnesium carbonate, etc.

[0356] Methods of introduction of these compositions include, but are not limited to, intradermal, intramuscular, intraperitoneal, intraocular, intravenous, subcutaneous, topical, oral and intranasal. Other suitable methods of introduction can also include gene therapy (as described below), rechargeable or biodegradable devices, particle acceleration devises (“gene guns”) and slow release polymeric devices. The pharmaceutical compositions of this invention can also be administered as part of a combinatorial therapy with other agents.

[0357] The composition can be formulated in accordance with the routine procedures as a pharmaceutical composition adapted for administration to human beings. For example, compositions for intravenous administration typically are solutions in sterile isotonic aqueous buffer. Where necessary, the composition may also include a solubilizing agent and a local anesthetic to ease pain at the site of the injection. Generally, the ingredients are supplied either separately or mixed together in unit dosage form, for example, as a dry lyophilized powder or water free concentrate in a hermetically sealed container such as an ampule or sachette indicating the quantity of active agent. Where the composition is to be administered by infusion, it can be dispensed with an infusion bottle containing sterile pharmaceutical grade water, saline or dextrose/water. Where the composition is administered by injection, an ampule of sterile water for injection or saline can be provided so that the ingredients may be mixed prior to administration.

[0358] For topical application, nonsprayable forms, viscous to semi-solid or solid forms comprising a carrier compatible with topical application and having a dynamic viscosity preferably greater than water, can be employed. Suitable formulations include but are not limited to solutions, suspensions, emulsions, creams, ointments, powders, enemas, lotions, sols, liniments, salves, aerosols, etc., which are, if desired, sterilized or mixed with auxiliary agents, e.g., preservatives, stabilizers, wetting agents, buffers or salts for influencing osmotic pressure, etc. The agent may be incorporated into a cosmetic formulation. For topical application, also suitable are sprayable aerosol preparations wherein the active ingredient, preferably in combination with a solid or liquid inert carrier material, is packaged in a squeeze bottle or in admixture with a pressurized volatile, normally gaseous propellant, e.g., pressurized air.

[0359] Agents described herein can be formulated as neutral or salt forms. Pharmaceutically acceptable salts include those formed with free amino groups such as those derived from hydrochloric, phosphoric, acetic, oxalic, tartaric acids, etc., and those formed with free carboxyl groups such as those derived from sodium, potassium, ammonium, calcium, ferric hydroxides, isopropylamine, triethylamine, 2-ethylamino ethanol, histidine, procaine, etc.

[0360] The agents are administered in a therapeutically effective amount. The amount of agents which will be therapeutically effective in the treatment of a particular disorder or condition will depend on the nature of the disorder or condition, and can be determined by standard clinical techniques. In addition, in vitro or in vivo assays may optionally be employed to help identify optimal dosage ranges. The precise dose to be employed in the formulation will also depend on the route of administration, and the seriousness of the symptoms, and should be decided according to the judgment of a practitioner and each patient's circumstances. Effective doses may be extrapolated from dose-response curves derived from in vitro or animal model test systems.

[0361] The invention also provides a pharmaceutical pack or kit comprising one or more containers filled with one or more of the ingredients of the pharmaceutical compositions of the invention. Optionally associated with such container(s) can be a notice in the form prescribed by a governmental agency regulating the manufacture, use or sale of pharmaceuticals or biological products, which notice reflects approval by the agency of manufacture, use of sale for human administration. The pack or kit can be labeled with information regarding mode of administration, sequence of drug administration (e.g., separately, sequentially or concurrently), or the like. The pack or kit may also include means for reminding the patient to take the therapy. The pack or kit can be a single unit dosage of the combination therapy or it can be a plurality of unit dosages. In particular, the agents can be separated, mixed together in any combination, present in a single vial or tablet. Agents assembled in a blister pack or other dispensing means is preferred. For the purpose of this invention, unit dosage is intended to mean a dosage that is dependent on the individual pharmacodynamics of each agent and administered in FDA approved dosages in standard time courses.

[0362] The present invention is now illustrated by the following Exemplification, which is not intended to be limiting in any way. All references cited herein are incorporated by reference in their entirety.

### EXAMPLES

### Example 1

Patient Population

[0363] The original patient list contained the names of over 7,000 patients who attended the private clinics or outpatient clinics of allergists practicing at the Allergy/Pulmonary Divisions of the National University Hospital of Iceland during the years 1977 to 2001 (ECRHSG; 1997). For this study, patients were selected with physician-diagnosed asthma who were being treated with asthma drugs and who were related to at least one other patient within and including 6 meiotic events (6 meiotic events separate 2^{nd} cousins) as revealed by a computerized genealogy database. Ages ranged from 12-70 years (mean 39.3 yrs) and 62% were females. Information regarding the age at diagnosis, medications, hospital admissions, and family history of atopy and asthma were gathered. The diagnosis of asthma and atopy were clinically re-confirmed in the study by a new physical examination, measurements of skin test reactivity to 12 aeroallergens (including birch, grass, Rumex crispus, cat, dog, horse, Cladosporium, Mucor, Alternaria, Dermatophagoides pteronyssinus, D. farinae, and Lepidoglyphus destructor), total IgE levels, and pulmonary function tests (PFT). Unless a baseline forced expiratory volume in 1 s (FEV1) was ≦70% of predicted value (based on sex, height, and race), a methacholine (MCh)-challenge test was performed. The phenotype assessments, PFTs, and methacholine tests were performed according to ATS guidelines (Cockcroft, et al., 1977; Palmquist, et al., 1988). Patients were considered as being atopic if their skin prick test reaction was positive (i.e., ≧3 mm or ≧50% of the histamine positive control response). The diagnosis of asthma in Iceland is based on the diagnostic criteria outlined by the NHLB and the American Thoracic Society (National Institutes of Health 1997; American Thoracic Society 1995) and includes any of the following measures:

[0364] Patient having recurrent symptoms of cough and wheezing for more than 2 years and demonstrating clinical response to bronchodilator therapy (as measured by >15% increase in FEV1 following bronchodilator treatment).

[0365] Patient having reduced FEV1 (FEV1<80%) at baseline prior to bronchodilator therapy and showing >15% improvement in FEV1 following bronchodilator therapy.

[0366] Patient having recurrent symptoms of cough and wheezing and on methacholine challenge test, performed in accordance to ATS guidelines (American Thoracic Society 1995), has >20% drop in FEV1 at methacholine concentrations ≦8 mg/L.

[0367] Severity of asthma was determined by the combination of signs and symptoms, PFTs, MCh values, and requirements for therapy. On the basis of these criteria, approximately 90% of the patients were scored as having mild to moderate asthma and 10% with severe asthma. FEV1>80% predicted was considered normal. Before blood samples were obtained, all patients included in the study were re-examined by the same two allergists who confirmed the asthma phenotype and severity level and supervised the measurements of total IgE levels, spirometry and skin testing prior to obtaining blood samples. In this study, a reduction in FEV1 of 20% or more at a MCh concentration of 8 mg/L or less is considered positive challenge test.

[0368] The patient participation rate for the study exceeded 90%. All patients signed informed consent, donated blood samples, and completed a detailed medical questionnaire and all tests necessary for proper phenotyping. The study was approved by the Icelandic Data Protection Commission and the National Bioethics Committee. Personal identities of the patients and their family members were subsequently encrypted by the Data Protection Commission of Iceland (Gulcher et al., 2000). All blood and DNA samples were also coded in the same way. All participants were asked, by questionnaire, whether they had been diagnosed with asthma and/or atopy and whether they were receiving drugs to treat if they were being treated. The names of the drugs were recorded and confirmed to be anti-asthma and/or allergy medications. Blood was also collected from close relatives of the index cases to increase the information available for the linkage analysis. All participants had their lung function measured at the time the blood was drawn for the study.

Pedigrees

[0369] deCODE has built a computerized genealogy database with over 650,000 names that includes all 285,000 living Icelanders and most of their ancestors (Gulcher and Stefansson 1998). The database has a connectivity of over 95% in the 20^{th} century and 86% in the 19^{th} century. Its maternal connections are 99.3% accurate as measured by mitochondrial polymorphisms of maternally linked individuals (Helgason et al., 2000). The genealogy database was used to cluster the patients in pedigrees. The genealogy database is reversibly encrypted by the Data Protection Commission of Iceland before it is used in our laboratory (Gulcher and Stefansson 1998). Recursive algorithms are used with the encrypted personal identifiers to find all ancestors in the database who are related to any member on the patient list within a given number of generations back. The cluster function then identifies ancestors who are common to any two or more members of the patient list.

Genotyping

[0370] Five hundred ninety-six patients were genotyped with asthma belonging to 175 families, in which each patient was related to at least one other patient within and including 6 meiotic events. DNA samples from all 596 patients and 538 relatives were successfully genotyped using 976 specific fluorescently labelled primers with an initial average spacing of 3-4 cM genome-wide. A microsatellite screening set was developed based in part on the ABI Linkage Marker (v2) screening set and the ABI Linkage Marker (v2) intercalating set in combination with over 500 custom-made markers. All markers were extensively tested for multiplex PCR reactions. The PCR amplifications were set up and pooled using Cyberlab robots. The reaction volume used was 5 μl and for each PCR reaction 20 ng of genomic DNA was amplified in the presence of 2 pmol of each primer, 0.25 U AmpliTaq Gold, 0.2 mmol/L dNTPs and 2.5 mmol/L MgCl₂. The PCR conditions used were 95° C. for 10 minutes, then 37 cycles of 15 s at 94° C., 30 s at 55° C. and 1 min at 72° C. The PCR products were supplemented with the internal size standard and the pools were separated and detected on Applied Biosystems model 3700 Sequencer using Genescan v3.0 peak calling software. Alleles were called automatically with the DAC program (Fjalldal et al., 2001), and the program, DecodeGT, was used to fractionate according to quality and edit the called genotypes (Palsson et al., 1999). In regions demonstrating linkage using the framework marker set, marker density was further increased (i.e., fine mapping of locus) by additional microsatellite markers to obtain coverage of 0.2 cM on the average in these regions.

Statistical Analyses

[0371] A genome-wide linkage scan was performed using a framework map of 976 microsatellite markers. The data was analyzed using the Allegro program (Gudbjartsson et al., 2000) and determined statistical significance by applying affecteds-only allele-sharing methods (not specifying any particular inheritance model). The Allegro program, a linkage program developed at deCODE genetics, calculates LOD scores based on multipoint calculations (Gudbjartsson et al., 2000; Kruglyak et al., 1996; Kong and Cox 1997) and is available for free for non-commercial use by sending e-mail to allegro@decode.is. The linkage analysis approach uses the Sₚₐᵢᵣₛ scoring function (Kruglyak et al., 1996; Whittemore and Halpern 1994), the exponential allele-sharing model (Kong and Cox 1997), and a family weighting scheme that is halfway, on the log scale, between weighting each affected pair equally and weighting each family equally. All genotyped individuals who are unaffected are treated as “unknown”. P values are calculated based on the large sample theory; Zlr=√(2 logₑ(10)LOD) is approximately distributed as a standard normal distribution under the null hypothesis of no linkage (Kong and Cox 1997) and the observed LOD score is compared to its complete data sampling distribution under the null hypothesis (Gudbjartsson et al., 2000); The information measure we use is part of the Allegro program output (Nicolae 1999) and closely related to a classical measure (Dempster et al., 1977). Information equals zero if the marker genotypes are completely uninformative and equals one if the genotypes determine the exact amount of allele sharing by descent among the affected relatives. The marker order and positions for the framework mapping set were obtained using a high-density genetic map developed at deCODE. Data from 146 Icelandic nuclear families (sibships with genotypes for two to seven siblings and both parents) providing 1257 meioses were analyzed to estimate the genetic distances. By comparison, distances in the Marshfield genetic map were estimated based on 188 meioses. Inter-marker distances in the peak region after enrichment with 4 markers were estimated using an adaptation of the EM algorithm (Dempster 1977) within Allegro.

Linkage Analysis

[0372] A list of over 7,000 patients from the National University Hospital of Iceland were cross-matched with the genealogy database. In the present study, patients with physician-diagnosed asthma who were related by 6 or fewer meiotic events to other patients with asthma (6 meiotic events separate 2^{nd} cousins) were included. These were 596 patients in 175 families with asthma. In the present study, over thirty families had at least 6 affected members each. Two of these families used in the analysis are displayed in FIG. 2. The patients' demographic data, geometric mean IgE values, lung function tests (including % predicted FEV1, and FEV1/FVC ratio), methacholine challenge test and skin test results to the most common aeroallergens in Iceland are shown in FIG. 4. Seventy-three percent of the patients were atopic as defined by a positive skin test reaction.

[0373] More than 400 of the study patients were tested for airway reactivity using MCh challenge. As shown in FIG. 4, although 67% of the patients tested had more than 20% drop in FEV1 at a MCh concentration of less than 2 mg/L, over 90% of the patients tested positive at a MCh concentration of 8 mg/L or less. This would be consistent with moderate to severe airway hyperresponsiveness in ⅔ of our asthma study population. The spirometric values reported in FIG. 4 are those obtained during the study at which time the majority of the patients had stable asthma and were on full therapy; however, all these patients have previous spirometric values with FEV1<80% predicted at one or more earlier time points in their medical charts (data not shown). Bronchodilator reversibility was tested in selective cases including those patients who had negative results of a MCh challenge and from whom clinician determined the test to be necessary to support the asthma phenotype.

[0374] Thirty-three percent of the patients gave a history of having smoked for more than 1 pack-year. Of those, 47 percent had smoked for fewer than 10 pack-years. The possibility that some or few of the study participants who are smokers had mild co-existing COPD cannot be excluded; however, only 0.5% of study the patients who were 55 years or older had smoked for more than 20 pack years (FIG. 4). In contrast, all study subjects have asthma as defined by the ATS criteria (American Thoracic Society; 1995); which is the phenotype used for this study thereby minimizing the potential of confounding effects from COPD.

[0375] Five hundred ninety-six patients and 538 of their unaffected (i.e., non-asthmatic) relatives were genotyped using 976 microsatellite markers in a genome-wide linkage scan. The disease status of relatives was obtained by a questionnaire. The data was analyzed and determined statistical significance by applying affecteds-only, allele-sharing methods (which do not specify any particular inheritance model) (Gulcher et al., 2001). Since the linkage scan was performed on affected status only, there is no possible confounding effect from the relatives even if an affected relative in the group was not identified. The genomic region that showed the most evidence for linkage to the asthma phenotype was chromosome 14q24 with a lod score of 2.66 (single test p=2.16×10⁻⁴). Given that the information content on identity by descent sharing in the region was less than 85% (i.e., 0.77), which is less than preferred, another 34 microsatellite markers under this peak were added to ensure that the results are a true reflection of the information contained in the material. This increased the information content at the peak to over 95% and produced a lod score of 4.00 (single test p=8.70×10⁻⁶). This locus is significant on a genome-wide basis, even allowing for the multiple marker testing, and it corresponds to a genome-wide adjusted P-value of less than 0.05 (Krugylak and Lander 1996). This locus was designated as asthma locus one (AS1). The locus peak is centered on markers D14S588 and D14S603, which are spaced 84 kb apart. The locus, defined by a drop of approximately 1.0 in the LOD score, is between markers D14S1069 and D14S289 centromeric, and telomeric respectively. The segment with a 1-LOD drop is around 3.9 centimorgans and is estimated to correspond to around 3.0 million bases. The genome scan shows for the first time significant linkage of asthma to markers on chromosome 14q24. It should be noted that a suggestive linkage to this locus has been previously demonstrated by investigators in the United Kingdom (Mansur 1999) and the United States (The Collaborative Study of the Genetics of Asthma 1997). Chromosome 14q24 contains many genes that could contribute to the susceptibility to asthma, including genes that encode for the EGF-response factor 1, phosphatidylinositol glycan class H, secreted modular calcium-binding protein 1, a disintegrin and metalloproteinase domain-20 and -21, and RNA polymerase II transcriptional regulation mediator, to name a few.

### Example 2

Assessment of MAP3K9 Expression in Human Airway Tissue:

[0376] Lung tissue from 2 asthma patients and 2 controls (all 4 are smokers who developed lung cancer and needed resection) were studied. Airway tissue from a non-cancerous (healthy) part of their small airways was isolated and examined for expression of MAP3K9 using RT-PCR. A 10 fold increased expression of the b-isoform of MAP3K9 was observed in these 2 patients (see FIG. 9) compared to controls.

### Example 3

Assessment of MAP3K9 Expression in Peripheral Blood Mononuclear (PBM) Cells:

[0377] The expression of MAP3K9 in PBM cells from asthma patients vs controls was examined by the above described methods and significantly enhanced expression was seen for the b-isoform (variant b) of the gene in patients compared to control (numbers are listed in FIG. 10).

[0378] In conclusion, evidence from the linkage and case-control association studies demonstrate that the MAP3k9 gene is the culprit asthma gene, as judged by positional cloning. In addition, evidence from both asthmatic airway tissue and PBM cells from patients with asthma show that expression of the b-isoform (variant b) of the MAP3K9 gene is enhanced relative to control samples. Collectively, this evidence supports the role of the MAP3k9 gene as a therapeutic target for asthma.

TABLE 1
Haplotype Analysis

| | | | Haplotype |
|---|---|---|---|
| haplotype | marker | type | allele |
| hap1 | DG14S205 | microsatellite | −4 |
| hap1 | DG14S428 | microsatellite | 0 |
| hap1 | D14S1002 | microsatellite | 10 |
| hap1 | DG14399 | microsatellite | 13 |
| hap1 | DG14S404 | microsatellite | 0 |
| hap2 | DG14S428 | microsatellite | 0 |
| hap2 | D14S1002 | microsatellite | 10 |
| hap2 | DG14S399 | microsatellite | 13 |
| hap2 | DG14S404 | microsatellite | 0 |
| hap3 | D14S251 | microsatellite | 2 |
| hap3 | DG14S1300 | microsatellite | 0 |
| hap3 | DG14S420 | microsatellite | 4 |
| hap3 | DG14S1266 | microsatellite | 2 |
| hap4 | DG14S417 | microsatellite | −2 |
| hap4 | DG14S251 | microsatellite | 6 |
| hap4 | DG14S298 | microsatellite | 14 |
| hap4 | DG14S1879 | microsatellite | 4 |
| hap5 | D14S1002 | microsatellite | 10 |
| hap5 | DG14S399 | microsatellite | 13 |
| hap5 | DG14S404 | microsatellite | 0 |
| hap6 | DG14S399 | microsatellite | 13 |
| hap6 | DG14S404 | microsatellite | 0 |
| hap6 | DG14S406 | microsatellite | 4 |
| hap7 | DG14S399 | microsatellite | 13 |
| hap7 | DG14S404 | microsatellite | 4 |
| Hap8 | DG14S1266 | microsatellite | 0 |
| Hap8 | DG14S205 | microsatellite | 4 |
| Hap9 | DG14S420 | microsatellite | 3 |
| Hap9 | DG14S399 | microsatellite | 11 |
| Hap10 | SG14S89 | SNP | 3 |
| Hap10 | SG14S152 | SNP | 3 |
| Hap10 | SG14S174 | SNP | 3 |
| Hap10 | SG14S184 | SNP | 3 |

[0379] Alleles #'s: For microsatellite alleles: the CEPH samples (CEPH genomics repository #1347-02) are used as references, the lower allele of each microsatellite in this sample is set at 0 and all other alleles in other samples are numbered in relation to this reference. Thus allele 1 is 1 bp longer than the lower allele in the CEPH sample, allele 2 is 2 bp longer than the lower allele in the CEPH sample, allele 3 is 3 bp longer than the lower allele in the CEPH sample, allele 4 is 4 bp longer than the lower allele in the CEPH sample, allele −1 is 1 bp shorter than the lower allele in the CEPH sample, allele −2 is 2 bp shorter than the lower allele in the CEPH sample, and so on.

### Table 2

[0380] TABLE 2
Allele frequencies and significance of haplotypes that capture the relative risk of the
asthma gene, MAP3K9.

| | | | # | | | con. | | | |
|---|---|---|---|---|---|---|---|---|---|
| Hap # | p-val | r | aff | aff.freq | #con | freq | H0.freq | X2 | info |
| Hap 1 | 0.001 | 5.913 | 169 | 0.067 | 134 | 0.012 | 0.042 | 10.349 | 0.813 |
| Hap 2 | 0.0003 | 10.400 | 179 | 0.062 | 135 | 0.006 | 0.039 | 12.954 | 0.810 |
| Hap 3 | 0.0018 | 11598.500 | 111 | 0.032 | 120 | 0.000 | 0.013 | 9.744 | 0.939 |
| Hap 4 | 0.000009 | 2.809 | 212 | 0.128197 | 974 | 0.04974 | 0.069271 | 19.708 | 0.654318 |
| Hap 5 | 0.0001 | 150.592 | 185 | 0.060 | 139 | 0.000 | 0.040 | 14.979 | 0.606 |
| Hap 6 | 0.0012 | 2.784 | 184 | 0.135 | 138 | 0.053 | 0.103 | 10.478 | 0.832 |
| Hap 7 | 0.0006 | 2.831 | 196 | 0.145826 | 141 | 0.0568588 | 0.110 | 11.935 | 0.829 |
| Hap 8 | 0.00049 | 2.435 | 189 | 0.077 | 879 | 0.033 | 0.041 | 12.157 | 0.937 |
| Hap 9 | 0.00067 | 3.653 | 191 | 0.0388 | 731 | 0.011 | 0.016 | 11.562 | 0.989 |
| Hap | 0.0000016 | 2.536 | 166 | 0.158 | 625 | 0.068 | 0.087 | 23.065 | 0.983 |
| 10 | | | | | | | | | |

Hap#—Haplotype number
p-val—p-value
r—relative risk
#aff—number of affecteds (patients)
aff.freq—frequency (of haplotype) in affecteds
#con—number of controls
con.freq—frequency (of haplotype) in controls
H0.freq—frequency (of the haplotype) under the null hypothesis (in affecteds and controls)
X2—chi squared
Info—information content

[0381] TABLE 3

| | | | |
|---|---|---|---|
| | Seq. Pos. | | SEQ ID |
| Markers | in NCBI Build 34 | Primer Pair | NO: |

| | | | |
|---|---|---|---|
| DG14S205 | chr14: 69.250346- | F: CATGGGTAAGAGAAAGGGAACA | 3 |
| | 69.250499 | R: AGGTCCCAGCATAGTTCCAG | 4 |
| DG14428 | chr14: 69.267407- | F: GGCAACGTTGACTTCCAGTA | 5 |
| | 69.267644 | R: CAGGCCAGAGTTCAAGACG | 6 |
| D14S1002 | chr: 69.291050- | F: AGATTTTGGATGTATCAGGC | 7 |
| | 69.291217 | R: CAGAAGCAATAGGATGGATG | 8 |
| DG14S399 | chr: 69.316672- | F: GTGTCAGCAACTGCACGATT | 9 |
| | 69.317039 | R: GGCATGGTGGTACATGTCTG | 10 |
| DG14S404 | Chr14: 69.3400521- | F: AAAGCTCAGCCAGAGTCTCAA | 11 |
| | 69.340691 | R: GGCCTTACAGTGCCTAGCAA | 12 |
| D14S251 | CHR14: 69.115638- | F: AAAGGATGAACTATTGGTGC | 13 |
| | 69.115937 | R: TTTACTTGTACCCAGTATGTNTCTG | 14 |
| DG14S1300 | Chr14: 69.134572- | F: TGAAAGGGAGCCTACGTCTG | 15 |
| | 69.134971 | R: TGAATGCGGGAGTAAATAAATG | 16 |
| DG14S420 | Chr: 69.167271- | F: AGGGTGAGAGACTGCTCTGG | 17 |
| | 69.167488 | R: GGAGGGAGGGAAGAAAGAGA | 18 |
| DG14S1266 | Chr14: 69.182502- | F: GCCAAAGAGAGAGGCAGGTA | 19 |
| | 69.182636 | R: CCAGATTGCTTCCCTTGGT | 20 |
| DG14S448 | Chr14: 69.216836- | F: CAAAGGATTAGCTTTACGGTATGT | 21 |
| | 69217046 | R: TCATGGCTGTGGGACAGTAG | 22 |
| DG14S417 | chr14: 69.083564- | F: GCCCTAAGGACTACACACAGA | 23 |
| | 69.083917 | R: GCCTTCCAACCATGAACAAG | 24 |
| DG14S1879 | chr14: 69.254098- | F: ATGGGCAAAGAAGTGGCATA | 25 |
| | 69.254375 | R: TACAGGAGACTGCCACCACA | 26 |

[0382] TABLE 4

| | | |
|---|---|---|
| | SEQ | |
| CEPH | ID | |
| (bp) | NO: | Amplimer |

| | | |
|---|---|---|
| 165/ | 27 | CATGGGTAAGAGAAAGGGAACATTTACATTTTGGGATCACGT |
| 165 | | AAGTAAACCAGTTCACATGATATttcattcattcattcattc |
| | | attcattcattcCTTTTATCTATacatttattgaggacccta |
| | | ctatgcacctggaactatgctgggagct |
| 244/ | 28 | GGCAACGTTGACTTCCAGTAAGAAAGGTTCTCTGATCTTTTT |
| 244 | | TTCTCTTTTCTTTTCTTTTCTTTTCTTTTCCTTTCTTTTCTT |
| | | TTCTTTTCTTCCAGGGTCTCAGTTTGTTGTCCAGGCCAGAGT |
| | | GCAGTGGCGCAATCTCGGCTCACTGCAGCCTCAACATCCTAG |
| | | GCTCAAGCCATCCTCCCACCTCACCCTCCCGAGTAGCTGGAA |
| | | GTACAGGCTCGTCTTGAACTCTGGGCTG |
| 157/ | 29 | AGCTCTNCCTGGTTCACTAGCAGACTGTCTTTGGACTTGAAC |
| 157 | | TTCTCTTTTTCCTACATCTCTGGCCAGTNAGCCTNCCGTGTC |
| | | AGATTTTGGATGTATCAGGCTTCCACAATTGGGTGAGGCGAT |
| | | TCCTTTAGAATAAATCTCTTTTACACACACACACACACACAC |
| | | ACACGTGTACCCACACACACGTGCATATGCACACACACACAC |
| | | GNACACATCCATCCTATTGCTTCTGTTTCTNTGGAGANCCCT |
| | | NATACAAATTNGCATGTCATTAAATATCACTAGTGTTGTAGC |
| | | T |
| 375/ | 30 | gtgtcagcaactgcacgatttctccctattcagccagtaggg |
| 379 | | aatctagagcaattctattatctagtacaactttagcaagag |
| | | aatttaaagtctgttatgcaaccatagcctttgcaatagaat |
| | | ctgctatagagatgattataaggaatttccttccttccttcc |
| | | ttccttccttccttccttccttccttctttctttctttcttt |
| | | ctttctttctttctttctttctttctttctttcttctttctt |
| | | tttctttctttctttccttctttGAGACAGGGTCTfGctcaa |
| | | cctcccaggctcaagcaattctccctacctcagtctcccaag |
| | | tggctgggagtacagacatgtaccaccatgcc |
| 174/ | 31 | AAAGCTCAGCCAGAGTCTCAATFCCTATAACCTCCyrCccat |
| 178 | | ccatccattcatccatccatctatccatccatccatccatcc |
| | | atccatccatccatccaGCTGATGGAttaataaatttatatc |
| | | aagcacttactctgagcaaggcattttgctaggcactgtaag |
| | | gcc |
| 298/ | 32 | CTACAGAGCAATTAAAAAAGGATGAACTATTGGTGCATTTAA |
| 300 | | CAACTTGGATGCATTGCAAGGAAATTATGCTGAGTGTAAAAA |
| | | GCGCCTTCCAAAGGATTTCATGCTATGTGATTCCATTTATAT |
| | | AATATTTTCAAAATGACAAAATTTTAAAAATAGAGAACAGGT |
| | | TAGCAGTTGTCAGGGGTTAAAGAGGAAGTGGTGGGACAGGAA |
| | | GGAGATGATAGAGGAACCTACACACGATAAAACTGTATATAA |
| | | CTAAACACACACACGCACACACACACACAGACACACANACAG |
| | | ANACATACTGGGTACAAGTAAAGCT |
| 407/ | 33 | TGAAAGGGAGCCTACGTCTGACCCCTAGACTTGCCTTGTTTT |
| 407 | | CCAAGTCtcacagaatattagggctggacagaagcttgaagc |
| | | tcagtagttcaaccctcttttctttcagatgagagatcaagt |
| | | ccagagatgattaagagatttattcaaggtcacacagatagt |
| | | aagcagcaaatctgaactggaactcaggtcagtttcctgaca |
| | | acaaacaatactctttccactgaaccaAAGTATAGTTCCAAA |
| | | atatatatacacacatatatgtatatgtgtgtacgtgtgtgt |
| | | atatatatatatatgtgtgtgtgtgtgtatatatatatatGC |
| | | TGTAAAATTGTTCTCTTCTAAAGAAAGAAGGAGCATAGTACT |
| | | CATTTATTTACTCCCGCATTCA |
| 243/ | 34 | AGGGTGAGAGACTGCTCTGGAGCTCAGTGAGGGACCTCAGGG |
| 243 | | TTACACAAGAAGGGACTCTGCGCTGGGTTCCAGGCCTGATTC |
| | | TTTTATTTTCTCTTTTTCTTTCTTTCTCTTTCTTTTTCTTTC |
| | | TTTCTTTTCTTTCTTTCTTTCTTTCTTTCTTTTCTTTCTTTC |
| | | TTTCTTTCTTTCTTTCTTTCTTTCTTTCTCTCTCTTTCTTCC |
| | | CTCCCTCC |
| 144/ | 35 | GCGAAAGAGAGAGGCAGGTACAttagggtgaaccatatgaaa |
| 144 | | tagctgatattcgactgtttttgacgtaaaaCCGTACGTATA |
| | | TTTcacacacacacacacacacacTTTTCTGCACCAAGGGAA |
| | | GGAATCTGG |
| 210/ | 36 | CAAAGGATTAGCTTTACGGTATGTGAATAATAGCTCAATAAA |
| 210 | | GCTATTATTTAAAATAAACGTGCACACACACAGACACACACA |
| | | CACACACACACATACAGAGCTCACTTTACAACACATCAGGAC |
| | | AATAACTCGATGGACTGATATATAATGATAAACTACAGTCCT |
| | | TTCTTTTGTATACTAAGGTGATGCTACTGTCCGACAGCCATG |
| | | A |
| 358/ | 37 | GCCCTAAGGACTACACACACACACACACACAGAGAGAGAGAG |
| 362 | | AGAGAGAGACAGAGAGAGAGAGAGAGAGAGAGAAAATCTATT |
| | | AGAACTAATCAATAAATTTAGCAACATTGCAGGATACAAAAT |
| | | TAACACACAAAAGTCAGTCGCATTTCTATACACTAACAACAA |
| | | ACAAATTCGAAAAGGAAATTAAGAAAACAATTCCATTTATAA |
| | | TAACATCAAAAACAAAAAAAATTAGGAATAAAATGAAGTAAG |
| | | AAGGTGAAAGACTTGTACAGTAAAAACTATAAAACATTGCTG |
| | | AAAAGAGTAAAGAAGATAGAAATAAATAGAAAGGCATTTCTT |
| | | GTTCATGGTTGGAAGGC |
| 286/ | 38 | ATGGGCAAAGAAGTGGCATAACACTTCTAAGATAATTTTAAG |
| 286 | | CCTGGGCCACAAAGCAAGAGTCCCATCTCTATTAAaataata |
| | | ataataataataataaAATTTTTTAAAAAAAggcttggtgca |
| | | ctggctcacgcctgtagtcccagaactttgagagactgaggc |
| | | aggtggatcacctgaggtcaggagttcgagaccaggctggcc |
| | | aacatggcgaaaccccacctctactaaaaatacaaaaattag |
| | | ccaggtgtggtggcagtctcctgta |

[0383] TABLE 5
MAP3K9 SNPs in Chromosome 14q24.2

| Position¹ | Marker name | Public name | Seq Id no. |
|---|---|---|---|
| 69.054355 | SG14S14 | rs1007402 | 39 |
| 69.65892 | SG14S130 | rs2332431 | 40 |
| 69.074372 | SG14S131 | rs2185146 | 41 |
| 69.079703 | SG14S132 | new² | 42 |
| 69.097983 | SG14S178 | rs1572678 | 43 |
| 69.102942 | SG14S141 | rs4902835 | 44 |
| 69.107276 | SG14S181 | rs1953796 | 45 |
| 69.117148 | SG14S134 | new | 46 |
| 69.117741 | SG14S182 | rs1959482 | 47 |
| 69.118774 | SG14S168 | rs9805907 | 48 |
| 69.119834 | SG14S77 | rs1205235 | 49 |
| 69.122800 | SG14S76 | rs1205233 | 50 |
| 69.128829 | SG14S96 | rs3742849 | 51 |
| 69.129320 | SG14S61 | rs8688 | 52 |
| 69.140462 | SG14S116 | rs4899366 | 53 |
| 69.157716 | SG14S118 | rs4141096 | 54 |
| 69.169752 | SG14S119 | rs4902841 | 55 |
| 69.169812 | SG14S268 | rs7144832 | 56 |
| 69.179795 | SG14S409 | rs8006539 | 57 |
| 69.181464 | SG14S242 | rs3742848 | 58 |
| 69.186468 | SG14S94 | rs2286053 | 59 |
| 69.186468 | SG14S411 | rs2286053 | 60 |
| 69.188592 | SG14S412 | rs11844774 | 61 |
| 69.189493 | SG14S97 | rs3829955 | 62 |
| 69.189493 | SG14S308 | rs3829955 | 63 |
| 69.194410 | SG14S413 | rs8011047 | 64 |
| 69.199037 | SG14S147 | rs4899368 | 65 |
| 69.199066 | SG14S98 | rs4902843 | 66 |
| 69.199066 | SG14S314 | rs4902843 | 67 |
| 69.205290 | SG14S165 | new | 68 |
| 69.205421 | SG14S148 | rs2332457 | 69 |
| 69.205421 | SG14S315 | rs2332457 | 70 |
| 69.205770 | SG14S99 | rs10129495 | 71 |
| 69.205770 | SG14S317 | rs10129495 | 72 |
| 69.210078 | SG14S166 | rs4902847 | 73 |
| 69.210257 | SG14S149 | rs4902848 | 74 |
| 69.212106 | SG14S120 | rs1476609 | 75 |
| 69.217954 | SG14S108 | rs3814872 | 76 |
| 69.217954 | SG14S318 | rs3814872 | 77 |
| 69.218041 | SG14S100 | rs11621281 | 78 |
| 69.236948 | SG14S247 | rs2107666 | 79 |
| 69.237009 | SG14S173 | rs2158531 | 80 |
| 69.237036 | SG14S248 | rs2158530 | 81 |
| 69.243542 | SG14S415 | rs8019513 | 82 |
| 69.244739 | SG14S249 | rs1034769 | 83 |
| 69.244739 | SG14S416 | rs1034769 | 84 |
| 69.249713 | SG14S151 | rs2107665 | 85 |
| 69.249922 | SG14S90 | rs2158529 | 86 |
| 69.253468 | SG14S417 | rs2051857 | 87 |
| 69.257386 | SG14S101 | rs4902857 | 88 |
| 69.261096 | SG14S89 | rs2023955 | 89 |
| 69.262833 | SG14S152 | rs4902858 | 90 |
| 69.276792 | SG14S175 | rs4902860 | 91 |
| 69.284136 | SG14S125 | rs4899373 | 92 |
| 69.286711 | SG14S174 | rs2332467 | 93 |
| 69.287341 | SG14S177 | new | 94 |
| 69.296950 | SG14S74 | rs1018976 | 95 |
| 69.299388 | SG14S186 | rs992941 | 96 |
| 69.299524 | SG14S72 | rs979536 | 97 |
| 69.299704 | SG14S159 | rs1024512 | 98 |
| 69.300316 | SG14S75 | rs1024510 | 99 |
| 69.307253 | SG14S184 | rs4899377 | 100 |
| 69.338169 | SG14S143 | rs2810084 | 101 |
| 69.344621 | SG14S156 | rs36561 | 102 |
| 69.349626 | SG14S71 | rs714421 | 103 |
| 69.354602 | SG14S1 | rs36555 | 104 |
| 69.360375 | SG14S161 | rs2158537 | 105 |
| 69.361945 | SG14S129 | rs917067 | 106 |
| 69.363621 | SG14S45 | rs2240341 | 107 |
| 69.371260 | SG14S163 | rs2526874 | 108 |
| 69.378439 | SG14S115 | rs12892688 | 109 |

¹Position numbering relative to Build34 (Database name)
²Detected by sequencing

[0384]

| | |
|---|---|
| Se- | |
| quence | |
| ID no. | Amplimer [sequence variation] |

| | |
|---|---|
| 39 | TTAAAAGTGAATACTAATAGTTACCCTGCATGTCAAATTTGC |
| | ATAAACCCAAACAAAACTCCAGTTTTTCTTCTAAAAGTTCTA |
| | CTCTGCACTTCATGATCCACAGTTTGAAAGAACTGTTCATTG |
| | CAAAACTTGTATTTGGAAAAAGTGC[C/T]ACCTTCTTAAAAT |
| | AACTTACTTCAAGTGTTCTAATGTTAGCCTCTGCATTTTGAC |
| | CACTTCATTATTACATGTTCTGTCATAAAAAGGATTACTTCT |
| | TTCTGAAAAGTAATCCAGGACACTACCACTGTTCAAAATAGG |
| | GATCCAAGAGCTGTCAACCCAAGAAATTCCCAGCAGATTGTC |
| | TATGGGAAAGAAAACAAAATGATAAAGGATTAGAAAAATAGA |
| | AAGAATCCAATCCAACA |
| 40 | AATAATGGGAAAGGCTTCTATTCTTAACATGCTTAGTTTGTA |
| | TTTTAGATAAATAAGACATACAGGTATACGTATATACACTCA |
| | AAGATAAAACAAGTAATTCATAATTTTTGTTGCAAATCTATT |
| | ACTCCCCTTACCAGAAAACTATATTTACACATAAGAATTTGT |
| | CAGATCTCAAAA[A/G]CAAGATTGGAAATCATAGTGATCATT |
| | GTATATTTTAATATAGAATGAAAATAAATTTGACTTTGAGGT |
| | ATAGTTGAAATGGAAATAAATCAGATGTGAAATTAGATTGAA |
| | TAAGTTCAAAGTGGTAATGAAAATAAGCCTTGTATGTACAAA |
| | TTCAATAAAAGTATTTGTCTCCCTACAGGCATAGCAAACATA |
| | GGTGGAAAGATTTTACAAAGGTATTATGGGG |
| 41 | GGATGTTTAAGCAGAAACAATGAAAGACTAGTAGAAGTTAGC |
| | CAATGAAAAGGAGAGGTAAGAAAATGCAAGCAGAGGGAAGAG |
| | CATGAACCAAAGCCAAGAGGCAAGAGAGAAGAAGAAAATGGA |
| | AAATGTTCGGAATAGCTGGAACATCGAATATATGAGAAGACT |
| | GGATGAGAGTAGATTGTC[A/G]CAGAAATCAGAAGTAAGATC |
| | ATTGTAAACTATGCCAAGGAATTGAGAGCAGTGGGACACTAA |
| | AGAAAGATTTTAAGGAGGCAAGTGACAAGGAGGCAAGATTTC |
| | AATTTAGAAATGTGTTATCATAATCTAAGCCTGAAAAGATGA |
| | TGACCTATGCTAAGTAAGTAACAGTAACAGTAAAAAGAAATG |
| | AACTAAAATGATAGATATTT |
| 42 | AGATAGAAATTATAAAAAAAGAACCAAACAAATTCTGTAGCT |
| | GAAAAATATAATAACGGTAGAAAAAATAGTAGAAGGATCCAA |
| | CAGCAGACTTGATCAGGCAAAAGAAATAGTCAGCAAACTCAG |
| | AGACAGATCATGTAAAGTCACTGAGTCAGAGGAGCAAGAAGA |
| | AAAAAAATGAAGAAAAGTGAAGACAGCCCAAGGGATTTACAA |
| | AACACTATCAAGTAGCCTAATATATG[C/T]ATTATTAAAATC |
| | TCAGAAAAAGAATGAGAGAAAGGGACAGAGAGCTTATATGAA |
| | CAAATAATGGTGAAAACTTCCTAAATCTGAGGAAAAAGAAGA |
| | ACATACAGACTCAAGAGCTCAATTCAGAACCCTAACCAGAAT |
| | AA |
| 43 | GGTGTATCTTCGCCTGTAGACTGGGAGTTTCTTGAGGTCAGG |
| | GGAGTGACTTGCCTATCTTTGCCTCTTAGCCTTAGCAGATCC |
| | CCAGTAGACAGCTGACACTCAGAACCGACCAAAAGAAGGAAG |
| | GAATGGGACCTCCTGAGGAAGGGCACAGAACTGTCCTGTAAA |
| | TGGAAACTAGACCGGAGGGACGC[C/T]AAGCCGATGACCCAC |
| | AGTAACAGGTGTTCTCCATCTCTGATGTCTGTGATTCATCCT |
| | GCACAGCTGCGCGCACACAGCACACGCATACACAGGCTCCCA |
| | GAATACGGCGCCCCACACGCTGTACCGCCCGTCGCGTTCTGG |
| | ACGCCCCGGCGACCACACACACCGAGA |
| 44 | GATGACTTGAGGGGACGCATGAAGGGTGTGCAGGCAATTTGC |
| | AAAGGGCACCAGGTTGTGGTCTCTTCTGGCTGGGATTTCCTT |
| | TTGGTTGGAAGAGATCTGGCCAGTTGTGCTGGGCCCCTGGGT |
| | GT[A/G]ATTTTTGCGTATCTTGTTTTCCAGGAAATTCAAAGA |
| | AATAGGTAGGGATCGTTCTGTTTCTACGGAATTTTGAATGAT |
| | CCTGATACAATGATTAGAAAAGATATCCTGACCTTCCTGGGG |
| | AGACATAGGAATCTGATCTTTACAGAGGCTACAAAGGAAGCA |
| | TGTATTGGCCTGTTGATGGACTCTTCTTGACATTGAACAAGA |
| | CACAGGACTCCCCTGGGGCCTTGGAAT |
| 45 | CACTGCACGCCAGCGTGGGGGACAGAGCAGGACACCATCTCA |
| | AAAAAAAAAAAGAATATACTTGATGAGGAAAATAAAAGGGGA |
| | GTTCTTTGAAGGCTAAAATTTCCCCAATTCTCTTCAGACATC |
| | TTCTTAAGAA[C/T]GTAGGAGAAGTGGGGCTTAGTGAAAAGG |
| | GACCTGGACTGCAAGTTCTGTCTCTAACTTTCTGTGTGCCTT |
| | GGATCAAAGAATTTTACCTCTTGGACCATGGTGTTCTGATTT |
| | TCAGAAAATTAAGGGTTGAATTCTAAGATCTCTAATCTCCTT |
| | TCCAGGTCTTAAAGAAAAATTCTCCACATCATTCTTTCTGAA |
| | CTGTGTGGCCATTACATGGAATAGAGAAGTTCTATGTGTG |
| 46 | GCACACATGTGCAGATTTCCAGCTCTAGGACTTGGCCATCTG |
| | ATACCTGTCTGCCCTTGTGGGTAGTGGGTGAAAATCTACTTT |
| | AGATAGAAAATCTACTTTAAATTACGCTGTAGCTTTGTTTTG |
| | TACCACAT[A/G]TTGTATATAGGACTCAAGATGGAAATTTTC |
| | TCCAATTCATGTACACATTGCTGGGCAAACCATATTTGATAA |
| | GTGACTTTCTAAAGAACTAGTATTTATGAGAATCCATTTTTG |
| | TCCCAGCACTGTGAGAAGCATGTAATGTGCATTAATTATCTC |
| | ATTTCATCATCATAAGCGTTCCCCCAAAGTTCCTATTTAACA |
| | TGGGAAGAATAAGACCCAGGGTGATCATATAACTCGCCCTCG |
| | G |
| 47 | TTCTTCCACTTTACTACTATGTCATTGCTTCTTGAAATAAAT |
| | TTGAAAGCAAATCAAATAATTTGGCAAACTTTTGGGAAAATT |
| | TTCCCCTAGGAACCCAATGGCCATTTCCTGGGCCCATCTCAC |
| | AAAGCAGTGACTAGCAAGGTATATTAGTTTCCTAAGGCTGCT |
| | GTAAT[A/G]TCACACACTGGGTGACTTAAAATAACAGAAATT |
| | CATTGTCTTGTCATTCTAGAGGCTAGAAGTGAAACATCAAGG |
| | TGTCGGCAGGGTTGGTTCCCTCTGAGGGCTGTGAGGAAGAAT |
| | CTGTTCCAAGCCTCTCTCCTAACTTCTGGTAGCCCCAGGCAC |
| | TCACTGGCTTTGTAGATAGCCGTCTTCCTAGATCTTATTGCA |
| | TCATCTTT |
| 48 | GCTGGCAGTGGAGGAATCTGTACTTGGGAGGGGTGGTTGGAG |
| | ATTTGCAGCTTCAATTCTTGTCCCCCAGATTTGCCTTTCTCT |
| | TGTAAGTTCACTGGCCACCTCTGCTATCACCCTGTTTGGCTC |
| | AAGGAAGGCTGTTTCTCCTCTAGCACTTCTTCCCACG[C/T]C |
| | TTGATAGAGGCTTGTCTTCATTCTCCACAATTTGGCTGATTC |
| | CAGGCCACTGCATTTATTCAGCCTTTTCAGAAGACCCAAAGG |
| | CCAGAAAGTTAATAATATTTCTTTCAATGGAGCCTCTAGATA |
| | TGGTTGTCTGAGAGCTCAGGCCCTTTGCCATGCATCTTCCAC |
| | CCTGTACCTCTTCTGCTGCCAAGTGACTACATCTTTGAATCC |
| | AAGTATATCCACAGCAGCCTTTTCAGAAGACCCAAAGGCCAG |
| | AAAGTTAATAATATTTCTTTCAATGGAGCCTCTAGATATGGT |
| | TGTCTGAGAGCTCAGGCCCTTTGCCATGCATCTTCCACCCTG |
| | TACCTCTTCTGCTGCCAAGTGACTACATCTTTGAATCCAAGT |
| | ATATCCACAG |
| 49 | ACTGTGACTTTTCAAGGCAGAGCCAAGAAAGAGAGGGAGCGA |
| | GAGGGGAATGGCCTATTTCAGAAAGTTTGGGAAGCCATGCAT |
| | GCCAGGTTGGAGCAGAGAACCAGAGGGAAGGGTAAAAAAGGT |
| | GAAGCTGGAAAAGAAAGAAACGATGACACAGAGAGCCTTCTG |
| | GTCCACGTAGAAGATCTGGGACTTCATTGTGAGGCAAGAGTG |
| | GATTTGGA[C/T]GATGAAGTGATGGTGACTCAGGTGACCAGA |
| | GTGGAGGCGGATAAGCAGGAAAAACAGATCAATGTAAGTGGC |
| | ATCCAGGAGGCAGAGGTGACCAGCAGCAGGGAATTTCTGCAA |
| | TATTTTCTCTCTGCTGTCCACATTTGCAAGGTAGAGCCGTTC |
| | ATCTG |
| 50 | CCGTGAGCCACAGGGAGCCACAGGGCTGGGACTAGAGTGATG |
| | ACACGCCTGGAGGATGACTAAATGGCCTTGAAGAATGATTGA |
| | AATTTCGTGCCCTAGGCACCTCCCTCTAATCCCAACCCTGCT |
| | GAGCCACCTCGCCTCCATTTAACCACTCAAATATCTAGTAGG |
| | CATTGACCAACGGCAAAGTATGTTGCATACTT[C/T]GGAGGG |
| | AGTACAAAAAAAGAGACAGGAAAAAGGCACCTGTCTGCTTCT |
| | TCAAAGCAAATAAAAACAGAGACTTAGGAGGCAAAACTGGTG |
| | CTTCTGTTCACAACCCGGCTGGGTGGCTGGGGGAGAATGCTG |
| | ATGCTCTGTTCCTTCTTTGTGCCCAGACTTTTCCACACTGAC |
| | AGAAG |
| 51 | AGGTGACAGGGAGGGAAAGATGATGGCGAGGGGAAAGAGCAT |
| | CGTATAGGCTAGGGGATTGAACTGTGGACTGATTCAGTGTAA |
| | ATAAAAACAAATTAACAGGTAGTAGTTCCTGTCAGTTCTGTT |
| | GGAAGCAGCCCACTCCCTCACTT[G/T]TACTCCTTCCTCCAA |
| | CCCTCAATCAGAGCTACTTACAGCCAGGCAGGATGGGGCTTT |
| | CCCCAAAGCAATTGGCCGTTTGTCCAGTGGCAGACAATGGTG |
| | GCTACAGCCTTTGTGCTTTTAAGAGTGGGCTGGGATTGTGGA |
| | GACTGCCCAGGGGCTTGGCTTTGTCAGAACTTGTACAATCTT |
| | CTTTTGATGAAATTATCTGAACTCAACATCTAGCACATAGAA |
| | TGTGTT |
| 52 | TTAAACTAATTTCATCCCAGCCTAGTCTCCTGATGTCTGTGC |
| | TCGTTATGCTATGCCATGTTGCTTCAGTCAAACAAGAAACAC |
| | TTACTGAGGGCATATTGTTTGCCCATCATTGTGCAATATGCT |
| | GTGGGACATGGGATGTCGTCTCAGTCTTCAAGGAAATGGAAG |
| | GGTTAAGAAATGCATATGAGATTATTACCAATGACACC[G/T] |
| | TTAATTTATATGATGCTTTAAAATTATCAGAGCACTTTCATG |
| | TATTTTTCGTGTGACTAGTGAAAAAGACAATGTTGTACAAAA |
| | TTAAAATATATACAGATGCAATAATGTGAATAGTTAGGATTT |
| | ATTAAATGCATTATCTTCAGATCTTTACATGTATAATCTCAT |
| | TTCTTTCATGCAGTTACTC |
| 53 | GTTTCTGACATTCATGTAAGTGGAAAAATACAGTATTGTAAC |
| | TTTTTTATCTTAATGCAATACAATTTCATTCTTATTAAACAT |
| | AATCATATTGCTTTCCATATTTCCTCATAGCTTCTTGTGAAC |
| | ATTTTGATCTTGGTTCTGCCAACCATATCTGCTAATTTCCCT |
| | AACTTTATGCCACCTACAGACTTAATAATTCCTTCTGTCCTT |
| | TATCCAAC[A/G]TAAGACAAAACCAATGATAGAGTCCAGGGT |
| | ACTTAACTAGAAACCTCCCTTCAATTTTCAAGCTTAGGAAAT |
| | GAGAAGCATTGTGAAAGCGCCAGCCAAATGGGGGGACCTGGA |
| | GACAACACATGTGGATGGAGAGGGCTGTGTTCTGTTAGGATG |
| | CAGTGAAGAGGGAGG |
| 54 | CGTCTCACAAGCCAATGGGAGGAGCTGGGAACCCAGCATTAG |
| | CTGGAAGGTGCTCACCTTCCCTCTTGATGGTTGACTCAGTGC |
| | CGACACAGACTTTAGCTGTCAGCCTGAAAGCAATCAGCTCAT |
| | CATTGCAGCCTCTTTATTGTCTAAATTTTTCTGAA[A/G]GCA |
| | TGAGAAGCCACTGGCCTTTCAACAGGGCTACCGAGGACCTGG |
| | GGAAGAGAAGGGCAGGGAAGCAGAGACAGAGGCCAAACACAA |
| | GTGCTTCTGCCAGCAGGGTTCAGAGCACATCTGGCAACCCCA |
| | GCTCCCAGCCCTGAAGCAGGCACCAGGCTACAAGGACAGACA |
| | TAGACCAGGGACAAGGAAAAGGAAGGGCCAGCCCCAAAGCCG |
| | TTGGGA |
| 55 | TACATGTAAGCTCCACATACCGGGCTATGGACAAAGTATGTC |
| | TTGTCCAACTTTGTTGTCTCAACATGTACCACTTAGCAGATG |
| | CTCAATAAATATTTGTAGGAAGAAGAAGGGCAGGAAGGGGGA |
| | AGGGCAAGAAGAAAAGGCAGTCAA[A/G]GTGAAGCAGCACCC |
| | CTGCCCTTCTGAGCCCCTTTCAGTATCATGCTGACTCTCATC |
| | TTCATGTGGAAAACCTGCCATTTGACTGGGCCAGTTGCACTG |
| | ATTATGTTTTACCGGAGAATGAGCCGAGTGGACTAGGAAAAC |
| | ACTTTAAAAGTCAGTTGTGGGGCAGGGTAGGGGGTGGGGGCA |
| | TTGGCATGAAAATGTTTAGATTTCTTCAGTATTGACTTTGTT |
| | TTGTCAAACAAGT |
| 56 | ACCACTTAGCAGATGCTCAATAAATATTTGTAGGAAGAAGAA |
| | GGGCAGGAAGGGGGAAGGGCAAGAAGAAAAGGCAGTCAAGGT |
| | GAAGCAGCACCCCTGCCCTTCTGAGCCCCTTTCAGTATCATG |
| | CTGACTCTCATCTTC[A/G]TGTGGAAAACCTGCCATTTGACT |
| | GGGCCAGTTGCACTGATTATGTTTTACCGGAGAATGAGCCGA |
| | GTGGACTAGGAAAACACTTTAAAACTCAGTTGTGGGGCAGGG |
| | TAGGGGGTGGGGGCATTGGCATGAAAATGTTTAGATTTCTTC |
| | AGTATTGACTTTGTTTTGTCAAACAAGTCCTCTTGAGGGTAG |
| | GGACCATGTCTAGTTCAGTCTCCGCTGTAGCTCCAGCACCTT |
| | GCATAGTGCGTAGTG |
| 57 | TTACAGAGCAACCAAACAAACACATGTGTGAACTTTCACTTC |
| | ACCTAGACTTAAAAGCCCTAAGGGGGAGGAAAAATCGCAAAG |
| | AAAGCTTTTCTGTGAACTAAGTAAAACCCATCTCCAATTCCT |
| | TTCCTTAATCCTCTACAAGCCTTAGACTATAAGATATCTGGG |
| | TTTC[G/T]GTGGGGAGTGCAGGATGAGTAGGGAGGGAAATCA |
| | GAAAAGAAAGTGAGCAAGTTCATCACCTCCCTTCTTTGCTAC |
| | AACTGTGTATCAAAGGCATGTGGCTCAATGTGACAAAAAGGC |
| | AAAAGCCTGACCTCAAGTGCCCAGGGAGGAGACACAAGCTAC |
| | AATAAGGCTTCCAAGCTCAAGAGACTGAGAGAAAAGTGAGGA |
| | GAAGCTGGAATGAAG |
| 58 | CCTCAGTAATCAAGGTAAATCATATTGCAATGCAGTATTTTT |
| | TAAAAATCAGAGTTATTGAAAAATTCCACGATGAATACAGTA |
| | TCAAAATTTTAAGTCAGGCTTTGTCTGGGTTGGTGTCCAGGT |
| | GTGAAGGATCTCAGGAACAGGCAGCA[C/T]ACTATTTCTGAA |
| | ACCTGGCCTTGGACTTCAGTGAGCGCAGGGCAAGGAACACCA |
| | CGGCCCTGGGGCCCTCGCTCCCCAGGGCTCCGCTTGTGACTA |
| | CTCTGACCTCTGGGTTCAGAATGCCCAGACGTCTATCCCTCA |
| | TGTTCCGGTAGGAGAGGCCTGTCTGTGCACCCCTGGAATGGT |
| | ATTCTGCTGTCCAATCCTGAGACACCTAACTAGTTAGACACC |
| | TATCTCGATAG |
| 59 | GTCCTGACCCCAAGTAGCTAGATGGGTACCCTCAATACTTGC |
| | TGGTTTGCCCTTTGCCGAGAGTTTCCAAAAAGAACAAGGACA |
| | TACTTCATGAACCTCTTCATTGCAACTTTACTGTATTTTTCC |
| | TAACATCCCCGTCCCCC[C/T]GTTCTCACTGAGGCAGTTCCC |
| | CTTTCCACCTGTGGGCTCAGATAAATAGGTGGGGCACCTGGA |
| | AGTGCAGATAGGCAGTGCCAGGTCTATCAAGCCCTATGACGC |
| | CACACTGGGCCACCTTGCTTTCAGTCTTCCTGCTAGCATGAA |
| | AGGGCTTAGGACACAGAAAAGCTCCTATCTCGAACCAAGCCA |
| | GATTCCCATTCCTGGGTGTTGGGGGACAGCGGAGGAGGACCA |
| | AAATCAA |
| 60 | GTTCGAGATAGGAGCTTTTCTGTGTCCTAAGCCCTTTCATGC |
| | TAGCAGGAAGACTGAAAGCAAGGTGGCCCAGTGTGGGGTCAT |
| | AGGGCTTGATAGACCTGGACTGCCTATCTGCACTTCCAGGTG |
| | CCCCACCTATTTATCTGAGCCCACAGGTGGAAAGGGGAACTG |
| | CCTCAGTGAGAAC[A/G]GGGGGAGGGGGATGTTAGGAAAAAT |
| | ACAGTAAAGTTGCAATGAAGAGGTTTCATGAAGTATGTCGTT |
| | GTTCTTTTTGGAAAGTCTCGGCAAAGGGGAAACCAGCAAGTA |
| | TTGAGGGTACCCATCTAGCTAGTTGGGGTCAGGACCTCGTCA |
| | GACCAGGTTCGGATACAATCATCTGCTCATCCCAGGAATAGT |
| | TTC |
| 61 | TAAACATGTGACGGGAACAGAGCTAGGTATCAGAAGTCCAAA |
| | GGTGAGTAATGTAGGGTTTCTGTTCCCAAAGAGGTCACATAT |
| | CTGAGTATAACAAAAAACAGGAGGGCAGGTCAAGCCAAACAG |
| | TTAAATACAACTGTTGTTGACACTTAAATCTCATTGAAAGGG |
| | TATTACTATGC[C/T]CCCTTTTCCTACTGGATTAGAGGCTGT |
| | TTCCAAGTCAGACTTAGGTCTTCCAGGGAGAAAGAGATGGTG |
| | ACAGGAAAGAGATGGTGACAGGAAAGAGTGTGTGTCCCCAGG |
| | TGTCAGATGTCGAGGGCAGTCATATGCAGGGGGATAGCAATT |
| | GCCTGGACTCATCTCCACGCCTGAAGAGGCAGGTATGAGTCA |
| | GGGGTG |
| 62 | GACGCTGCTCTGCCTCTCCTCCATCTCCGAGTGCAACTCCAC |
| | ACGCTCCGTGCTGCGCTCCGACAGCGATGAAATTGTCGTGTA |
| | TGAGATGCCAGTCAGCCCAGTCGAGGCCCCTCCCCTGAGTCC |
| | ATGTACCCACAA[C/T]CCCCTGGTCAATGTGCGAGTAGAGCG |
| | CTTCAAACGAGATCCTAACCAATGTCTGACTCCCACCCATGT |
| | CACCCTCACCACCCCCTCGCAGCCCAGCAGTCACCGGCGGAC |
| | TCCTTCTGATGGGGCCCTTAAGCCAGAGACTCTCCTAGCCAG |
| | CAGGAGCGCCTCCAGCAATGGGTTGAGCCCCAGTCGTGGAGC |
| | AGGTGAGTCTTCTTCCTCTTTTCTCTTTCCTTTCTTTGTGCC |
| | TCCTCAGGGAGTGAA |
| 63 | GAGTCTCTGGCTTAAGGGCCCCATCAGAAGGAGTCCGCCGGT |
| | GACTGCTGGGCTGCGAGGGGGTGGTGAGGGTGACATGGGTGG |
| | GAGTCAGAGATTGGTTAGGATCTCGTTTGAAGCGCTCTACTC |
| | GGACATTGACCAGGGG[A/G]TTGTGGGTACATGGACTCAGGG |
| | GAGGGGCCTCGACTGGGCTGACTGGCATCTCATACACGACAA |
| | TTTCATCGCTGTCGGAGCGCAGCAGGGAGCGTGTGGAGTTGC |
| | ACTCGGAGATGGAGGAGAGGGAGAGCAGCGTCAGGGAGGCAG |
| | AGGGGTCTCCTAGCAACAGCATGGGCTCCTCCTTCTTGAAAA |
| | GCTTTCGGGATGGGGGGCTGGTGGTCCGACGAGGACGGCTGG |
| | ACCTCTGAAAAAGACC |
| 64 | CCCCCAGGACTCAAGCCCACGAGTGAGAACACAAGCACACTC |
| | CAGGGTGTCACCCCTGTTGTGCCCTGCCCAGAGGAGCCATCA |
| | TACATGGCAGTGTGGCTATGGGGTGAGATCTGAAAATAGTTC |
| | TAGCGGCCCTGGAGTTGTATACAACTGTACTACCAG[A/G]GC |
| | TGGGTTATTCTGCCTGCCCCTGCTTCAGCATGAGCCTCTAGG |
| | CAAGAGAGTCCTGTTAACTTCTGCTCTTTCTTCTCTTTCCTC |
| | TGCTTTAAAAATGGAAGAAGAGCCAGGTATAAGCAGAACACC |
| | CTGGCAGAACTTTTTACATTTGGTTACTGCTTGGGTACTTGC |
| | TACTCTGAGTAGAACGCCTTCAGGGGTTGGCAAACTATAACT |
| | GGTGGGTTAAACCCTGCCCGC |
| 65 | GCCCCGGGTGAAGAAACGCAAGGGCAAGTTCAGGAAGAGCCG |
| | GCTGAAGCTCAAGGATGGCAACCGCATCAGCCTCCCTTCTGG |
| | TCAGTGGCCGGGGACTGGCTGGGAAGTGGGAGCAGGGCAAAG |
| | AACTCGTGTGGCAGAGGGTTTGAGGGAG[C/T]CCGGGACTGA |
| | GCTTGGAAACATGACACCCTGGGGCTCAAACTCCAGCCTGTT |
| | TTAAATGGGCCATTCTGTTCACTGGAAAGACTGGCATGTTGA |
| | AAATCTACCCTACTCCAGGGAAATTGTTGCATGTGAGTGAAC |
| | ACAGAATATGAAGTGAGGACAACCCGGCAAGGTCCAGGGTGC |
| | TAGAAGCCTGGTGGCTCACAGGGGCACATCTCACTTTAGGCA |
| | AACCTGGAGAAGG |
| 66 | CGGGAGATTGACATCCTGGAACGGGAGCTCAACATGATCATC |
| | CACCAGCTGTGCCAGGAGAAGCCCCGGGTGAAGAAACGCAAG |
| | GGCAAGTTCAGGAAGAGCCGGCTGAAGCTCAAGGATGGCAAC |
| | CGCATCAGCCTCCCTTGTGGTCAGTGGGCGGGGACTGGCTGG |
| | GAAGTGGGAGCAGGGCAAA[G/T]AACTCGTGTGGCAGAGGGT |
| | TTGAGGGAGTCCGGGACTGAGCTTGGAAACATGACACCGTGG |
| | GGCTCAAACTCCAGCCTGTTTTAAATGGGCCATTCTGTTCAC |
| | TGGAAAGACTGGCATGTTGAAAATCTAGCCTAGTCCAGGGAA |
| | ATTGTTGCATGTGAGTGAACACAGAATATGAAGTGAGGACAA |
| | CCCGGCAAGGTCCA |
| 67 | GAGTAGGGTAGATTTTCAACATGCCAGTCTTTCCAGTGAACA |
| | GAATGGCCCATTTAAAACAGGCTGGAGTTTGAGCCCCAGGGT |
| | GTCATGTTTCCAAGCTCAGTCCCGGACTCCCTCAAACCCTCT |
| | GCCACACGAGTT[A/C]TTTGCCCTGCTCCCACTTCCCAGCCA |
| | GTCCCCGGCGACTGACCAGAAGGGAGGCTGATGCGGTTGCCA |
| | TCCTTGAGCTTCAGCCGGCTCTTCCTGAACTTGCCCTTGCGT |
| | TTCTTCACCCGGGGCTTCTCCTGGCACAGCTGGTGGATGATG |
| | ATGTTGAGCTCCCGTTCCAGGATGTCAATCTCCCGCTCGGCC |
| | AGCTCCTGCTCCCGACGCCGCAGCAGTTCCTCCTGGTTCTTC |
| | TGCTGCAGTGCAG |
| 68 | AAATACTTTTCATAAAAACATGAAAAATGCCACACAATTTCA |
| | GACCCATGTTATTTTTTGCCCATATTCTATTTCTGATTCTGA |
| | TGTCAAAAGACATGGGAAGGATGTTCTGATAACTATCCTCAA |
| | GGTTGAAGTATCCCTATATCAAATTAACCTTCTTCTAGAA |
| | [A/G]TCTATTGTAGAATCAAGAAACATTTCCAGAACTTCTCA |
| | TATTTCCAGCTGGCAGGGTGAGACATTCCACTGTGAGAAAAG |
| | AAAAAAGGCCTGTAATCCAAGCACTGGGATTTTGCCCAACTG |
| | CATTCTTCTCTGGTTTGGACAATTAAGTAGATACCAAGCTGG |
| | AAGGTGGGCATGCTAGAATCAAGATGGTCAGTCAGACTCGGT |
| | CCAGAGGTCCCTGT |
| 69 | GTAAACAAAACAAAAAAAACAAGAAAAAAACGAACGAAAAGA |
| | AAAAAGGCATGCATTGAATTGGTAGACCTCACTCACAGGGAC |
| | CTCTGGACCGAGTCTGACTGACCATCTTGATTCTAGCATGCC |
| | CACCTTCCAGCTTGGTATCTACTTAATTGTCCAAACCAG[A/ |
| | C]GAAGAATGCAGTTGGGCAAAATCCCAGTGCTTGGATTACA |
| | AGGCCTTTTTTCTTTTCTCACAGTGGAATGTCTCACCCTGCC |
| | AGCTGGAAATATGAGAAGTTCTGGAAATGTTTCTTGATTCTA |
| | CAATAGACTTCTAGAAGAAGGTTAATTT |
| 70 | TCAAGGTTGAAGTATCCCTATATCAAATTAACCTTCTTCTAG |
| | AAGTCTATTGTAGAATCAAGAAACATTTCCAGAACTTCTCAT |
| | ATTTCCAGCTGGCAGGGTGAGACATTCCACTGTGAGAAAAGA |
| | AAAAAGGCCTGTAATCCAAGCACTGGGATTTTGCCCAACTGC |
| | ATTCTTC[G/T]CTGGTTTGGACAATTAAGTAGATACCAAGCT |
| | GGAAGGTGGGCATGGTAGAATCAAGATGGTCAGTCAGACTGG |
| | GTCCAGAGGTCCCTGTGAGTGAGGTCTACCAATTGAATGCAT |
| | GCCTTTTTTCTTTTCGTTCGTTTTTTTGTTGTTTTTTTTGTT |
| | TTGTTTACCTTTTCTTTGGCCCTGAGTTGGTCAAACATCTCC |
| | TGAATCTCGT |
| 71 | GTTGTAATGGTGGACAGTTTGCTTTACTTCCTGAGCCTTATT |
| | TGAGGTTACCTAAATTCTGATCTCTGTTTCTGGAAGAAGTAA |
| | GAGGTAGTTTTCTGGGAAGTGAGGCCATGTAATAGCCTAAGT |
| | CTTACATGTTTGCTTCTGTCCATTCATGCTTTCTGAGTATTC |
| | ACATGTT[C/T]TATTCAGACTGCTGGAATCCTGATCCCCACT |
| | CACGACCATCTTTCACGAATATCCTGGACCAGCTAACCACCA |
| | TAGAGGAGTCTGGTTTCTTTGAAATGCCCAAGGACTCCTTCC |
| | ACTGCCTGCAGGACAACTGGAAACACGAGATTCAGGAGATGT |
| | TTGACCAACTCAGGGCCAAAGAAAAGGTAAACAAAACAAAAA |
| | AAACAACAAAAA |
| 72 | CGTTTTTTTGTTGTTTTTTTTGTTTTGTTTACCTTTTCTTTG |
| | GCCCTGAGTTGGTCAAACATCTCCTGAATCTCGTGTTTCCAG |
| | TTGTCCTGCAGGCAGTGGAAGGAGTCCTTGGGCATTTCAAAG |
| | AAACCAGACTCCTCTATGGTGGTTAGCTGGTCCAGGATATTC |
| | GTGAAAGATGGTCGTGAGTGGGGATCAGGATTCCAGCAGTCT |
| | GAATA[A/G]AACATGTGAATACTCAGAAAGCATGAATGGACA |
| | GAAGCAAACATGTAAGACTTAGGCTATTACATGGCCTCACTT |
| | CCCAGAAAACTACCTCTTACTTCTTCCAGAAACAGAGATCAG |
| | AATTTAGGTAACCTCAAATAAGGCTCAGGAAGTAAAGCAAAC |
| | TGTCCACGATTACAAGCA |
| 73 | TTACAGAAGAGTTACAAGGAATCACTAACACCAACAACTAAC |
| | CCTCATCCAGAAATTACCATCTATGGCTAGTAGACCTGTGGT |
| | TTCTCCAAAAGGGCCTGAAATGAGATTGTGTCTGAGGAGGCT |
| | TATGTAGAGCTACAGTGTTGGTGAGA[A/G]CTTTGCTGAGGG |
| | ACACTGGCATTCAGAGAAGAAGTCTTTCTGGGGCTGACTAAA |
| | CTAGTTTTCCTCTGCCAACATCCCGCTTTATGTTTACAATGG |
| | AAGGTGGGTGATATAAATGAAGACTTGGTATTCTGTTGGTGG |
| | GAAAAAGACTGGAGAAATTCAAGAGAAATACAAGTTTACGTG |
| | GATCTGAGCTCAGGGAAAGGCGGGCAGTAGAAGTTGATGTGA |
| | TTTACCTCAG |
| 74 | GGCATTCAGAGAAGAAGTCTTTCTGGGGCTGACTAAACTAGT |
| | TTTCCTCTGCCAACATCCCGCTTTATGTTTACAATGGAAGGT |
| | GGGTGATATAAATGAAGACTTGGTATTCTGTTGGTGGGAAAA |
| | AAGACTGGAGAAATTCAAGAGAAATACAAGTTTAC[A/G]TGG |
| | ATCTGAGCTCAGGGAAAGGCGGGCAGTAGAAGTTGATGTGAT |
| | TTACCTCAGGTTTAGTCAACTTAGTTGCCCTCCCAAGGTAAA |
| | AGGTCAACAAGTCCTTTGATGACCATTTGCAAGCAGCCTGGA |
| | AGAACTCGTTCAGCTAAGTCACTGCCTCTGAGTACCTCCCCG |
| | CAACACAGACCCACCAGCTCCCACAGTGCTGCCAGTAATTTC |
| | CTA |
| 75 | TGGCATAGGGCAAGCATTCCACAGACACTTCTTGAATGAGTC |
| | AGTGAGTTACAAGTCAGTTTGGGAAACAGCTTTGTACCAAGT |
| | TCCTAGGCATGCCCTGGCCCTCCCTGAGACACCCTGCTGGGC |
| | CCTAGGCACGCACGGTGGGCTGATCATTCAGAAGAGGCTGCC |
| | TTAAGTGCAGGAACA[A/G]GACCATACAGATGGTGGCATAAC |
| | TACAAGCACAGATTGTCACTACACACATATCTAGTTCTAATC |
| | ATAGCTTTATGTCTGCCACCTGGGTGAACTTAGGCATGTGAC |
| | TTCAATTGTCTGAGCCCAGTTACCTCATCTGTAAAATGGAAA |
| | TGATGATCCCTACTTTGGGGAATTCTTGTGAAGACTATAGAA |
| | GATGTATAACATTTACCACAGACCCTAGCCCTTAAGCATTTG |
| | TAGGTGGTAACAA |
| 76 | GAAGAGTTCTGTTCTGTGGTTTCCCTGTGATTAATGCAGACT |
| | CTGGTTTCTTCTGTATTC[G/T]TTTCCTTGCCTAGTATTGAT |
| | CCTCCAGAAGGTGGAGAATGGAGACCTGAGCAACAAGATT |
| 77 | CACTGCCTTTGGAAAACATGGAGGCCCGGATGACTTCGGGTG |
| | CCATCCAAGCATACGTCCCTGCCGCACTCATCTTGGTGGTTC |
| | GGTGCCATTCCCGAGCCAGGCCAAAATCAGTGATCCTTCAGA |
| | ATCTTGTTGCTCAGGTCTCCATTCTCCACCTTCTGGAGGATC |
| | AATACTAGGCAAGGAAA[A/C]GAATACAGAAGAAACCAGAGT |
| | CTGCATTAATCACAGGGAAACCACAGAACAGAACTCTTCTGC |
| | CATCCTCCTGGCCTCTCCTGTGGGCTCCAGCATTTAGCTGCC |
| | ATGGATTGATGGTCAGAGCCATCATTTCTTAAACACCTACAG |
| | TGCATCCATTTTTGTACCACCCATTTTATAGCCACTATCTCT |
| | AAT |
| 78 | TATTTTAGTTTCTTCATCAGTAAAACTGAGATGGCAATAGTA |
| | CCTGCCTTGTAAGTTGTTGTGAGGATTAGAGATAGTGGCTAT |
| | AAAATGGGTGGTACAAAAATGGATGCACTGTAGGTGTTTAAG |
| | AAATGATGGCTCTGACCATCAATCCATGGCAGCTAAATGCTG |
| | GAG[C/T]CCACAGGAGAGGCCAGGAGGATGGCAGAAGAGTTC |
| | TGTTCTGTGGTTTCCCTGTGATTAATGCAGACTCTGGTTTCT |
| | TCTGTATTCTTTTCCTTGCCTAGTATTGATCCTCCAGAAGGT |
| | GGAGAATGGAGACCTGAGCAACAAGATTCTGAAGATCACTGA |
| | TTTTGGCCTGGCTCGGGAATGGCACCGAACCACCAAGATGAG |
| 79 | CTTATGCAAAGTTTTCAGACAGGCTGGTTAGTTAACAAGATT |
| | GGGATACTAGGGTGATAGTTTGAACCAGGCCACTCCCAAACA |
| | ACTCTGGTGGCCATAATGTGCATATGTGTTCTGGGGAACAAG |
| | GGAACAAATCAGATGTATTCATGTGGAGCAGGACTGGAGAAA |
| | CAAGGCAAAGCACCAG[C/G]GTTCCTCATAATGTGCCCACAT |
| | CCATGCCTGCCGCATGACTTAACAGCATGAGGTGTGGATTTC |
| | TGCTGCCTTGTTGGGTGGAGGATAGAAGGAGACATGATAGGG |
| | AACTAATATATTTATAGGCCTCCTGTAGGCACAGCACAATTC |
| | ATCAGCCTTGAAAAATGACTCCTTTAACCAGCCCCAACTTTC |
| 80 | TCCCAAACAACTCTGGCTGGCCATAATGTGCATATGTGTTCT |
| | GGGGAACAAGGGAACAAATCAGATGTATTGATGTGGACCAGC |
| | ACTGGAGAAAGAACCCAAAGCACCAGGCTTCCTCATAATGTG |
| | CCCACATCCATGCCTGCCGCATGACTTAACAGCATGAGGTGT |
| | GGA[C/T]TTCTGCTGCCTTGTTGGGCTGGAGGATAGAAGGAG |
| | ACATGATAGGGAACTAATATATTTATAGGCCTCCTGTAGGCA |
| | CAGCACAATTCATCAGCCTTGAAAAATGACTCCTTTAACCAG |
| | CCCCAACTTTCTATGGGAACTTCACTTTCATCTCTTTCTTGG |
| | AGGCCGTACCCACTTCCCACATCTCCCATGCTGCTGAGTGAA |
| | AGGTT |
| 81 | CATAATGTGCATATGTGTTCTGGGGAACAAGGGAACAAATCA |
| | GATGTATTCATGTGGACCAGCACTGGAGAAACAACCCAAAGC |
| | ACCAGGCTTCCTCATAATGTGCCCACATCCATGCCTGCCGCA |
| | TGACTTAACAGCATGAGGTGTGGATTTCTGCTGCCTTGTTGG |
| | GCTGGAGGA[C/T]AGAAGGAGACATGATAGGGAACTAATATA |
| | TTTATAGGCCTCCTGTAGGCACAGCACAATTCATCAGCCTTG |
| | AAAAATGACTCCTTTAACCAGCCCCAACTTTCTATGGGAACT |
| | TCACTTTCATCTCTTTCTTGGAGGCCGTACCCACTTCCCACA |
| | TCTCCCATGCTGCTGAGTGAAAGGTTCTCATGATTAAAACAG |
| 82 | AGATCCTGTTTCCACTGTTGTCTGAAATACTTTGGTCCTAGC |
| | TGGAAAGCCTGGCAGAGTAACAGTGTTCCATTGTCGGGCTAA |
| | AAGAAGGAACACTATCATGAGCATCAGGATGACCTTAGGCAA |
| | GTCAGTCAGCTTCTCTAGTTGACAACTGTAAGGTTCCAGTAA |
| | GCTCTAATCATA[C/T]CTATAAGCAAAAAAGAAAGTCAAGAA |
| | TGACCAGAATCCCAAAATCTATCGCTATTTTCCCTACCCACA |
| | GTCCTTTTCTCCTTCCTCTTATTTATTGTTTTTATTTTTAGT |
| | TTTTTGGTTTTTCTTGGTACTCACTGATTAAGGCATCCTCCT |
| | TCCTCTTGACCCTGAAGGTTAACAGAATGCAGAAACAAAAAC |
| | AAATTTTA |
| 83 | GACAAAAAAAAACACACAAACAAAACAAGATTTTTTGGTTGG |
| | CCACATTGGAATTGCCACCAAACACGTGGGCTGCTACATGCG |
| | AAGTCCTATACTAGGGATGATGTGAGGGGAGAGAGAGATGGG |
| | GGGAGCAAGGGAAGACGAAGGGATGAAAAACAGCAACACCTC |
| | TGCTGTC[A/C]AGAATTCTATTGGGATTTCTATGTTTTCATA |
| | GAAAAAAAGTTATCAGAGACAAAAAGATACTTAATCGCATTT |
| | GCCTCTAAGAAGTAAACTTAGGGTTTGGGAGGGAAGGACAGA |
| | GACTTTTCTTTTTTCTCTCTCTTTTTCTGGAGACAGACTTTT |
| | CTTTGTATTTCAATTTTGTCCTATTTTACCCATGTGTATCC |
| 84 | GACAAAATTGAAATACAAAGAAAAGTCTGTCTCCAGAAAAAG |
| | AGAGAGAAAAAAGAAAAGTCTCTGTCCTTCCCTCCCAAAGCC |
| | TAAGTTTACTTCTTAGAGGGAAATGCGATTAAGTATTTTTGT |
| | CTGTGATAACTTTTTTTCTATGAAAACATAGAAATCCCAATA |
| | GAATTCT[G/T]GACAGCAGAGGTGTTGCTGTTTTTCATCCCT |
| | TCGTCTTCCCTTGCTCCCCCCATCTCTGTCTCCCCTCACATC |
| | ATCCCTAGTATAGGACTTCGCATGTAGCAGCCCAGGTGTTTG |
| | GTGGCAATTCCAATGTGGCCAACCAAAAAATCTTGTTTTGTT |
| | TGTGTGTTTTTTTTTGTCCCTAGTTCCTTTCTGGATGGACTC |
| | AAAACACTT |
| 85 | GGAAAACCAGTCAGGAGCTTTGGCTAGTGTGTGGTCCAGGTA |
| | TACTCCAGGGCTTAGAATGTTAGAGCCTGCTGAGCTGAGGGC |
| | AATGGGAAGACAAAATCTCTATCATCCTCACACTGGTGAAAG |
| | CATGTCTTCAGCTTCCTGACCTTGTGAACTCCAAGAGAAGGT |
| | TGGAGA[C/T]GAGGACAAGGTGAAGTGAAGAGAATTTGGAGA |
| | GGGAGATGCTACATGGACCTCCAGTTCCAACAGGAGCAGCCA |
| | ATCCAACAATTCAACAAAACTGGAACAGGCACCATGAGGAGC |
| | GTGAGAGGCAGTCCCCAAGTTGGGAACAAAGGGAGTAGTGAG |
| | GTTGGACAGAACAGACTGGGAGTAGACCCGACAGCACCGGGC |
| 86 | CCAACAGGAGCAGCCAATCCAACAATTCAACAAAACTGGAAC |
| | AGGCACCATGAGGAGCGTGACAGGCAGTCCCCAAGTTGGGAA |
| | CAAAGGGAGTACTGAGGTTGGAGAGAACAGACTGGGAGTAGA |
| | CGCGACAGCACCGGGCAGTGGTC[G/T]GCTCCAGCAGCTCCT |
| | AGCAGCCGGCAACTGGGTACAGTGGAGACGTGGGCCAGTGAG |
| | TTAGCCAGGGCTGGTGATCAGGAAAAGTGTGAAGAGGGGAGG |
| | AGGCAGAGGCGTTTGGGATTAATAACGAATGTACTGTCACAA |
| | CACCACACTCCAGCATCCAAAACAGGTGGTTGGGCTCAGACA |
| | ATTAAGATGGATCAAGGGCCAGGGGACTCTAACGAGGAT |
| 87 | AAAGAAGCCCGGAGGATTTTAGGGCAGCTCCATATTGTCATC |
| | TGGGACCCAGGCTCCTATTTTTCACTCCCTCATCCCAGTACT |
| | TGGCTTCCATCCTCATTGTCACCCTGTGGTCGAGATGGCTGC |
| | TGGACTGCCAGTTATGAGGTCGAAGTGACAGGCCTGAAGGAT |
| | GAGGGGAA[A/G]CAGAAGCACAGAAAAGGTGCCCCATGTGGC |
| | TGAGTTGGCTCCCATTAATCTCCCGGAAGTCCAGCATGGCGT |
| | ATGTGCTTGTGTTAATTGGACAGAGTGTGGTCGCCTGGCCAT |
| | CACTCGCTGGAGAGGAGACAGGGAGATGGAGGCTTTTATGCT |
| | GGGTGTCATTGAACCCAGCTGAGAATCAGGATCTGTTATCAA |
| | G |
| 88 | CATCCTGGTGAATTGGGCTGTGCAGATTGCCAGAGGGATGAA |
| | CTACTTACATGATGAGGCAATTGTTCCCATCATCCACCGCGA |
| | CCTTAAGTGCAGCAACAGTGAGTATGAAGAGATGGGGCTGGA |
| | GGGGCTCAGAGCA[A/G]TTGCAGTTGTATCCCACGACGTCAG |
| | TAGGAGTGGACTTCTAATGGAACCTTAGAGGGCAGTGAAACT |
| | CCTTGCTTAAACACATTCCATCCTTGAATGGAGATGTAGGAG |
| | GTGAGATGAGTGCCAAGAAAGATTGGTTTAGGAAGAGAGGAA |
| | AGAGGCGCCTGAGGAGTTTGGGATAATTTTGAGCTTTTTTTT |
| | TTAGCAGTCTAGAGTGGCCTTCCCTACTATTTTTCCACATAT |
| | CAGAAT |
| 89 | TGATTCTGTATGTTCCCAATTAGAGAAGTAGCAGCTGACCTG |
| | GTGGGCCAGTTCTGCTATGTTCTGGGAGTTGTTCACATAGGT |
| | CCAGGTGAGAGCCTCTTCTCTCAGCCCTTCGAACAATTCTGC |
| | AAGCACAGAATTTCCTGTGGTAAATGTCTTTCTTGCTCAAAA |
| | TAGCTTGAGAGTTTCTGAGCCCCAGAATGAATCCAGACT[G/ |
| | T]ATTACTAACTTGTGCCTGATGTCATCTATATGAATGAGAA |
| | AAATATGCCTATGTTATAAAGAAAGATTAGAAACTCTCTTGG |
| | AGAAATACATGTTAAGAGTCTTCCTGGTCATGGAGGGAGGAA |
| | CATTCATGTTTTTCTAGCAGCTTTTACACATATGAAAAGATG |
| | TGTGATTACTTAA |
| 90 | CTAAAAATTAAAAAAACAAAAAAAGCTTTTAAATAAAGTTTG |
| | AAGCTAAATTTTCACTTTAAGAAGCAATAATATGAAACTAAA |
| | GCTGAACAGTATTGCTTGACTTAATGTCTTCTATTCATGGTC |
| | CAGAATGCAACGTCACAACACAT[A/G]CTCAGAGGAGAAGTT |
| | CAAAAGGGTAAGTCTGGCGATGAAGTGTCAGTGGCTCAATTT |
| | CATTCCAAGTCTTCGGAGACAAGGTTTGTCAATCGTCTTCAC |
| | TTTCCGAGTGACAGAAAGTGATCTGGTAGAGGACATAGACTT |
| | CAATGACCGCCCATGTTCACCCTCTGATGAACCAAGGGACTG |
| | CACTGAAGTTTTATATTTACATACTTAATCTCCCTCATGTAA |
| | CTTATAAGCAACTTC |
| 91 | TTAAATGACAACAGTCTAGTCCCTGAGAACCTTAACTGTATA |
| | AAATGACTAAGGGCGCAATAATGATTAGAAAACATTCAGACT |
| | CAAATAATAAAATACTTTCTCCTTTAACGTGGTTTTCCAGAT |
| | TTCTACTCAAGGAGACCTTTTAAGTGGCTAT[G/T]CCTTTCC |
| | TAGTTGAAGGCTGTGAATCTTTTGCTCACAGACATGAGACAT |
| | GAGTCTCCTGACACTGATGAGACCTTTAAGACAGTTGCCTGT |
| | TCTCTGGGTTACTGGATGGAGCCCTTTGTGAAGTCAGTGGGA |
| | GCCCCAGAGAGAAGCCTGCTTGGGCGGTGGAACATCAGGGAA |
| | ACTCTCTTGTGCTTTGTGTTTTATGAAAAGTAGGGGAGATTC |
| | CAACCTGAAGCCT |
| 92 | ACTCCGTCTCAAAAAAAAAAAAGAAAAGAAAAAAAAAACCCA |
| | AACTGCATCCAGAGAAAGCATGTAGACGTTCAGAGAGGAATG |
| | AAAACAAGAGGCTCCCTGTCATTCAGGCCTTGGTTCCCATGT |
| | GTCCCTGCCTGCTGTAAACAATATCCCACCAAGGGCCAG[C/ |
| | G]TTTTGCTAAAGATAGCTCTGGTGGGCTTCAATCACCATTA |
| | AACAGTTCCTAAACTAATTCTGCTAAGGCTAATGTAGAGCAG |
| | AAGACTCCCTTGGCCCATGTAACAGCTGTGTCATCATTCATT |
| | TACTCATCCCATCAGTCAATGAATATCATTGAATGCCAGCTG |
| | TTTACAAGCTTGTAAGAAGAGGAAGAAAAAACATTGGCTGCA |
| | GTCTTTA |
| 93 | CAGGTATTGTTTCGAAAGCTCATTCAAAAAGTGCTAGGTAAC |
| | TAGGCCAGGAAAGGTTTCCAGCCTAACATACTCTGCCCATTC |
| | CAGCCTTTCCAATATGATAACCTAAGTGCTGGTGTTCAGACA |
| | AATTGCCATTTCGGTCAACTCTTGTCATCAACTTAAGTTGCC |
| | CCTTGGG[G/T]AGGCTTAATGTCCCTTTCTGCCTTCTGGACT |
| | TGGTTGGGATCATCTTAGGCATTGGAAGTATCAAATAATGTT |
| | AAACCTCGAGAGATGTAGCTTGGGTATTAGGTCCCTTTCATT |
| | TAAGTAGGGTCCTTGGCCCCCAAAACACGTTTCTCCAACCTC |
| | TTTGGAAGTCAGCTACATACCAGGGATTAGACCAAACCTTA |
| 94 | CTTTCTACCCAAGAATCAGCAGTTTAATAGTTTCCTCATTCA |
| | TCATACCTGTAGAGCACTGCACTAGGAGAAAAAGAAATAAGA |
| | TAGAGGATTTCCCAAATGAAGAGGATAAAGGCCAAGGCAAGG |
| | CTGCAGCAGCAATCTGAGCTGTCCTGTGCGAAAGATGACAGG |
| | ACCACTGGGAGAGAAA[A/C]AGGGGAACAGGGACGGACAAGA |
| | GAGAAGAGGGAGTAATCAGTAGTCTGAAGACTGCTGGAGAAC |
| | AACTTGACATTGTGTATTTAAGGACAGCCTCAACAAAGAAAC |
| | CTTATTAGCCAGAGCTATCAAAATAGACCCACTTACTAAATA |
| | TGTTTCCAAACTCTTCACTCCCACTCAA |
| 95 | TGGAACCAATCGCCCATGACTACTGAGGGATGACTGTACTAA |
| | CCACTCCTCCAAGTAGCATGGAGCAGCTACTTGGGAGCAGTG |
| | AGCAGAGAAGCGTGTAGGAAGTGTGTGTGAAGTGTGAGCTCT |
| | GCTAGCATCGAAAGAAAGAGAGGAAGCAAAA[C/T]GACTGAC |
| | TTCCCGGCCCTGCCTCCCCTGCCATGTCAGATGGAAGCTTGG |
| | AGACTGACCCTTGAAAGCTCCAACTAAGGACGAAAAGAGAGT |
| | GAGGTGTGGAGAGCTTAGTGGGCCCTAACATGCCCACCAGAC |
| | ACAAGAGGCAATA |
| 96 | CTAACTTTCTTAAAAAAAAAAAAAAAAAGAAAGAAGAATATA |
| | TGTGAACCTAAAAGTAAACAGGAACATCTACGAAGAGGAGCG |
| | GGAATGAGTGTTGGTAGGTGGGTAGGAGACCACAGTTGCGCA |
| | CCTAGCC[G/T]GATCTCTGCCTAACTGCAGGTGTTCTACAGG |
| | CTCCTTCCATAGAGATGACAGGATGCATGGAAGGAAGAGCAC |
| | CCTGGAAGGAAAACACACAGTTCCAGAGGCCTCTTCAAACAG |
| | TACGAGTAATGCATACATAGAAGTGCAAAGGTGTGTACAGAT |
| | TATTTGTTCCCTATAGATACAGAGCCAGCAGTACTTAAGCAC |
| | ATAAATCCAGCTTTTCATCAATGAGAAGC |
| 97 | AGTTGCCCACCTAGCCTGATCTCTGCCTAACTGCAGGTGTTC |
| | TACAGGCTCCTTCCATAGAGATGACAGGATGCATGGAAGGAA |
| | GAGCACCCTGGAAGGAAAACACACAGTTGCAGAGGCCTCTTC |
| | AAACAGTACCAGTAATGCATACATAG[A/G]AGTGCAAAGGTG |
| | TGTACAGATTTATTTGTTCCCTATAGATACAGAGCCAGCAGT |
| | ACTTAAGCACATAAATCCAGCTTTTCATCAATGAGAAGCCAA |
| | ATGAGTCTCTCATTCATTTATTACTGGATCCACCTGTCTATA |
| | TAAAGCCCATCTTCATTTTGCCTGCTTGGTAAAAAAGGAAAC |
| | TCTCATTGGCTCACCTAGCTCTTAGAGTATAAG |
| 98 | GCAAAGGCAGAAAATAACTGACCTTTGGTCAGGACACAGTCC |
| | ATTTTCTGGGTTCTGGCCTAGACATGCAGCTCATGAAAGATT |
| | CAGACTTTATTTCTTATAGTCTAAGAGCTAGGTGAGCCAATG |
| | AGA[G/T]TTTCCTTTTTTACCAAGCAGGCAAAATGAAGATGG |
| | GCTTTATATAGACAGGTGGATCCAGTAATAAATGAATGAGAG |
| | ACTCATTTGGCTTCTCATTGATGAAAAGCTGGATTTATGTGC |
| | TTAAGTACTGCTGGCTCTGTATCTATAGGGAACAAATAAATC |
| | TGTACACACCTTTGCACTTCTATGTATGCATTACTGGTACTG |
| | TTTGAAGAGGCCTCTGGAACTGTGTGTTTTCCTTCCAGGG |
| 99 | TAAATGTTGAGATAGACTGGCTTCCTGGCTTACCCAAAGTGA |
| | GCCAGGGTAAGCTCACTTACCTTTAGCCAGAGGTGAGCTAAA |
| | ACCTGAATTGAGCACATTTCAGTTGCATTGTATAGGCAATGT |
| | TTTTGCTCATTTTTTTTCCATTGCATAACTTTATTCCACTC |
| | [C/T]CTGAGATGTTTCTCCATGCCCTTTTCCATCATTTTTTC |
| | ATATCTCCCTTGCTTCCATTTTTACTCTCTCCTTCTTTCCTC |
| | CAATAAAAAAGGGCTTCTTGGGTCACACCTCCATCAACAGAC |
| | GCTTGGAAATAACGCACCATGGCAGGTTTTCAAATATTTTTT |
| | CTTTCCTCCCTCCAGAGAGAAAAACAAAAGGGTAAAGATGGC |
| 100 | GGAAGAGGAGAAAATGGAAAGTTGTTTAATGGGTACAGAGTT |
| | TCAGTTCTGCAAGATGGAAAAGTTCTGGAAATCTATTGCAAA |
| | CAATGTGCAGACGCTTAACACTAATGAACTGTACCCTTAAAA |
| | ATTATAGACATGGTACATTTTATGTGCGCTTTTTTAACCACA |
| | GTTGAAAATTTTTTTTGAAGA[A/G]GCTGAAGTTTGCTGATT |
| | TTCTTTGAGACTTACTGCATCACTCAGTATCAGAAAATCTAA |
| | AAACAGGGGGACTGTGCAACTGATGAAACCAAATCCCTCATT |
| | ATGGTGTGTTTCTGTGTTAGACACCATAATCCCAAATTGCAC |
| | AGGTCTGCCTTTCCTTAAAGGATGTAACTGACTGGACTAAG |
| 101 | AGGAACCTGACCGTGCTGGGACCTTGATACTCATACTTCCAG |
| | CCTCCAGACATGTCAGAAAATAAATTTTTGTTGTTTAAGCCA |
| | CCCAATCCATAACATAGACTGGGTATLTATGTCACCCAGTGC |
| | CATAACATGTTATGCTATGGCAGCCTAAGCTGAGTTAGATAG |
| | TAACCATGATTATGTGACA[A/T]AAAAGGAGCATAGTAAAGA |
| | GAGCACATAATTCTAGAAGGGGTGGAGGTTGGAGAGAAATTA |
| | AGTTGAGAAGAGGAGAACAAGATGTCAGGAAAGTCTTCCCAT |
| | ATGAGATACTTCTAGGAATTGAGTCTAGTCTAGAGGAACAGG |
| | GAGTTATTCTCTAAATGGTCTGTAAGAAGAGCTGGGGGCCTT |
| | AAAAA |
| 102 | TCTGATTTCTAGCCTATTTTCCTTCCAATGGCACTGTCCTAA |
| | GGTTGTACAGCTTAGAAAATGTTAACCCAGTATTGTTTTCTT |
| | TACTTGCATGTGAGAGAAGAGAAGTCAAAGTGAAAAGCAGGC |
| | AGCTGGAAACCTCCAGGGGAAGGGATTCCCAGGG[G/T]TCCT |
| | TTATATTCCTTTCTCCCCAAGCAAAGCAGAGAGAGAAGCAGC |
| | ACACATACCCTGTGGATTCTGGGTTTGGAAAGCATAGTTGTG |
| | TTGTTCATCTGGGCTGCTATAACAAAATACTATACACTGAAT |
| | GGCTCATAAACCACAGAAATGTATTTCTCACAGTTCTGGTGG |
| | CTTGGAAGTCCAAAATCAAGGTGCCAGCAGATTTTGTGTCTG |
| | GTGAG |
| 103 | GAAAAGAGATCAGTGGAGAATGTGGCTGATCGTGCAGCCTTG |
| | GTGATAGATCTGACTATGGTAGTGCACATACTACATTTAAGC |
| | CCTGCTGTGTATCAAAGCTGGGTAGTCAACCCTAACACATAC |
| | CCTTCACTTATAATGAAACT[C/T]CTAATGGACTCTTGCTTA |
| | TAGGGAAAGCTTGTATAACCAACTCTCAATTTTTATGTGTAT |
| | GTAAGGTCAAAACTGCAGTGTTGTGTTAATGGTGATACCACT |
| | ACAATGTCTGTAGATATAGGCAATAGAAAACTGAAGCACTGT |
| | TATGACACAAATACAGTGTAAACATTCTTGAAAAACTGGGAA |
| | TTTGCTGCAGCATCACTCCTAGCCACTCCCCAGAAATTTGGA |
| | GG |
| 104 | TGTCTCTGAAGTTTGTCAGACTTAGCAAACTGCCAAAGCACA |
| | TGGCATGTGTTGATATAAAAACTTTCCAAATCAGGCTCTGAA |
| | CTCCAATTAGAATATAGTACAGAAGCAGAGGGAGGAAGGGCT |
| | GGAGAGACCAGGACAAAAGTTATCACACATTTACACTGGTTG |
| | TGATTGGG[C/T]AGTGGGCCTATTAACAAAGCTTTCTCTCTC |
| | TTTCCTATATTTTCTCAGATAAAAATACCATGAATGTGTTAC |
| | TTTTAGGATGAAAAACTAAATACAAAAGACCAATTGGATGTA |
| | AAATGGTGGAGAGGCTGGCCCAAGCAAACTCTCAATAAGTTG |
| | TCAGGTTTTCAAAATACAAGTCCAAAGGAAGAGTGGATAGAT |
| | A |
| 105 | CACTCATTTATTAATTTCTGCCTCTGTGCTTTTACTGACACC |
| | ATTTGCCTTTACTTAGAAAACATTACGCCTCCACCTGCCTGC |
| | TAAAATCCACTACGTCTACTCCAAACCCATTCTTCTATTTTT |
| | TGAACAGCCTAGAGCACTCACATGTTCCACTCATTTAGCGTT |
| | TAATTATGTGCTACTTCA[A/G]ATCCCTCCATCTAAACTGTA |
| | CATTCCTTGAGGGCAAGGCACTTCTCAGCATGTTCCACAGGG |
| | CCTAGCAGAGAAAGCTGTTAGCATCAATTAACACTCAGTTCA |
| | TATACATTGATTAAACAAAGCACAGAAACCAATGGCTTTCCA |
| | ATTAGAGATTTTAATCTGTTTTTTCTTTTTTTCTT |
| 106 | CAGGTTCTGGGATGAATCCCAGTCATTTTGGAGGGCAACTAG |
| | AGGTTTATATTAACACTCTGGGAGTTCAACATAAGGCAACCA |
| | TGCTCAGTGTGAAGTTTGGTCCTAGTTCTAGGTATTAGGCTC |
| | CTGCTTTGTTTGTAAGTCTCA[C/T]TCTGTCCCCCCAGATCC |
| | AGCCTTTGAATATTTGTTTTGTCCTGCTGGGTCCTCAAACTT |
| | GGGCCTCCAGTGAGTATCTCAGTAGCTCAAGGATCTGAGTTC |
| | TATTTGTTTTCATCAATTCGCTGTAGAAACGAAAGGGCAGAC |
| | CTAGAAAACCCCAGCACTGAAGCTGGGGCCTTGCTATAAGCA |
| | ACACACTTTCTCAAGGCTTGCCGT |
| 107 | CAAGAATGATTCCGTTTTTACAGCTATAAAAAGAGATCTACA |
| | ATGTCAATTTGTAGAAAAGTGTATTAATTTACAAAAAAAGCA |
| | GTTGATTTATAAAATGTTCTGTCTTTTGTGACGTAAAGGTGG |
| | AGTGTTGCACATTTAAAAA[C/T]ACAATCACCGCGTACAAAT |
| | GGTAAGCTGTCCACTCCATACTTGCATGTCCTGTGCCGCTTC |
| | TATTAACTTGTCTTTGGAAGTAGTAAATTCTCCCAGTCTGGA |
| | CGTGGCTATTTTTTTTTCTCAGACACGGGCCAACAGAGTTCT |
| | TGCTCAACTTGGGTGCGTTTATGACTTTTCAACAGTGTCATC |
| | AGCCGTACCTAACTCTTCCAGGCCTTCAGTATCTCA |
| 108 | TAAAGGAAAAGAAAATTAGACCTCCAAGAAAGCAGCCATATT |
| | TGTCAATTTGTAGAAAAGTGTATTAATTTACAAAAAAAGCAG |
| | TTGATTTATAAAATGTTCTGTCTTTTGTGACGTAAAGGTGGA |
| | GTGTTTTCTCCCACTTGAAAATTACTCCAAATCATAAAATCA |
| | TTTGGT[A/G]ATTGGAAAACTAGGAAAGTTTCTATTTTTTTT |
| | CTAGCCTTTGAATACACAGATTCAGTCAGGTAATTTGCTTTC |
| | TCTAGCTGACTTTACTGAGAGTTAAATCTTTCAACATTTTAT |
| | TAAAGAATTTTCAAACATATAGGAAAGTTGAGAAAATTGTAC |
| | CCACCACCTGGATTCTGTGTTTTTAAATATTGTGTCTCTATC |
| | TGTTTTATT |
| 109 | TGAGAATAAAGATAGGTAATCTTAACAAAAATATGCTTTGTT |
| | ACCAAAAATCTTACTTTACTCCCTTAATGTCACAGTATTGAA |
| | TATTGAAGAATACCAGGATGTGTTATTGAAAAATATACTTAA |
| | AATACTTTAAATATACTTGAAGTGATCTTTTTTCAATTTCTG |
| | [A/T]ATATGAAGATTTTCAAATGTATAAGAAAATTGAAAGAA |
| | TGCTTCATCTAGATTCCACTATTATGAACCTTTTTGAAAAAT |
| | CACATTTGTTTCAACTATATAAAGATGCATGGTATTTATCTG |
| | TACATACTCTGTCTCTCTTACACACATATGTGACTCAATTGA |
| | CAGTATGTTGCAAAGATTATGACACATCACCCCCTAAATGCT |
| | TCAGGCAATATTTTTA |

### REFERENCES

[0385] American Thoracic Society, Standardization of Spirometry, 1994. Update. Am. J. Respir. Crit. Care Med., 152: 1107-1136 (1995).
[0386] Bleecker E R, et al., Evidence for Multiple Genetic Susceptibility Loci for Asthma. Am J Respir. Crit. Care. Med., 156:S113-6 (1997).
[0387] Cockcroft D W, et al., Bronchial Reactivity to Inhaled Histamine: Asthma Method and Clinical Survey. Clin. Exp. Allergy, 7:235-43 (1977).
[0388] Collaborative Study on the Genetics of Asthma. A Genome-wide Search for Asthma Susceptibility Loci in Ethnically Diverse Populations. Nature Genet., 15:389-392 (1997).
[0389] Cookson W O, The Alliance of Genes and Environment in Asthma and Allergy. Nature, 25:B5-11 (1999).
[0390] Cookson W O, and Moffatt M F, Genetics of Asthma and Allergic Disease. Hum. Mol. Genet., 9:2359-64 (2000).
[0391] Dempster A P, et al., Maximum Likelihood from Incomplete Data via the EM Algorithm. Statist. Soc., B39:1-38 (1977).
[0392] European Community Respiratory Health Survey Group (ECRHSG), Genes for Asthma? An Analysis of the European Community Respiratory Health Survey. Am. J. Respir. Crit. Care Med., 156:1773-1780 (1997).
[0393] Fjalldal J B, et al., Automated Genotyping: Combining Neural Networks and Decision Trees to Perform Robust Allele Calling, Proceedings of the International Joint Conference on Neural Networks, A1-A6 (2001).
[0394] Gudbjartsson D F, et al., Allegro, a New Computer Program for Multipoint Linkage Analysis, Nat. Genet., 25:12-13 (2000).
[0395] Gulcher J R, and Stefansson, K. Population Genomics: Laying the Groundwork for Genetic Disease Modeling and Targeting. Clin. Chem. Lab. Med., 36:523-527 (1998).
[0396] Gulcher J R, et al., Protection of Privacy by Third-Party Encryption in Genetic Research in Iceland, Eur. J. Hum. Genet., 8:739-742 (2000).
[0397] Gulcher J R, et al., The Role of Linkage Studies for Common Disease. Curr. Opin. Genet. Develop., 11:264-267 (2001).
[0398] Helgason A, et al., mtDNA and the Origin of the Icelanders: Deciphering Signals of Recent Population. Am. J. Hum. Genet., 66:999-1016 (2000).
[0399] Holloway J W, et al., The Genetic Basis of Atopic Asthma. Clin. Exp. Allergy, 29:1023-1032 (1999).
[0400] Kauffmann F, et al., Epidemiologic Study of the Genetics and Environment of Asthma, Bronchial Hyperresponsiveness, and Atopy. Chest, 121(3 Suppl):27S (2002).
[0401] Kong A, and Cox N J, Allele-sharing Models: LOD Scores and Accurate Linkage Tests. Am. J. Hum. Genet., 61:1179-1188 (1997).
[0402] Koppelman G H, et al., Genetic and Environment in Asthma: the Answer of Twin Studies. Eur. Resp. J., 13: 2-4 (1999).
[0403] Kruglyak L, et al., Parametric and Nonparametric Linkage Analysis: a Unified Multipoint Approach. Am. J. Hum. Genet., 58:1347-1363 (1996).
[0404] Mansur A H, et al., Suggestive Evidence for Genetic Linkage Between IgE Phenotypes and Chromosome 14q Markers. Am. J. Respir. Crit. Care Med., 159:1796-802 (1999).
[0405] National Institutes of Health. 1997. Guidelines for the Diagnosis and Management of Asthma: Expert Panel Report 2, July 1997.U.S. Government Printing Office, Washington, DC. NIH Publication No. 97-4051.
[0406] Nicolae D L. Allele Sharing Models in Gene Mapping: A likelihood Approach. Ph.D. Thesis, Department of Statistics. University of Chicago, Chicago 126 (1999).
[0407] Palmquist M, et al., Hyperreactivitet hos 420 patienter med nydebuterad astma, Hygiea, 97:108 (1988).
[0408] Palsson B, et al., Using Quality Measures to Facilitate Allele Calling in High-throughput Genotyping. Genome Res., 9:1002-1012 (1999).
[0409] Weiss S T, Epidemiology and Heterogeneity of Asthma. Ann. Allergy Asthma Immunol., 87 (Suppl 1):5-8 (2001).

[0410] The teachings of all publications cited herein are incorporated herein by reference in their entirety. While this invention has been particularly shown and described with references to preferred aspects thereof, it will be understood by those skilled in the art that various changes in form and details may be made therein without departing from the scope of the invention encompassed by the appended claims.

The application's sequence listing, which the Patent Office published only in electronic form, follows.

SEQUENCE LISTING (4326 sequences)

SEQ ID NO: 1 - DNA, 79666 bp, Homo sapiens
tcctgcgggcggcggcggccccgcaccctatggatcggccgctccatggagccctccagagcgcttctcggctgcctagcgagcgccgccgctgccgccccgccgggggaggatggagcaggggccggggccgaggaggaggaggaggaggaggaggaggcggcggcggcggtgggccccggggagctgggctgcgacgcgccgctgccctactggacggccgtgttcgagtacgaggcggcgggcgaggacgagctgaccctgcggctgggcgacgtggtggaggtgctgtccaaggactcgcaggtgtccggcgacgagggctggtggaccgggcagctgaaccagcgggtgggcatcttccccagcaactacgtgaccccgcgcagcgccttctccagccgctgccagcccggcggcgaggaccccagttgctacccgcccattcagtgtaaggcgaaggcggggccgggcggggagggggaatgacggaggcctggggggcggtcggggaaggggggagcactgcgcgagggctgggatgagggcggggggtggggaggacgattgacctgggtgtgggtggcgcgcgcttaggctgcccgggctttgcttgctggataagctcgagacgcctcaggccctgcccgcacttcagacgcttgggcttcttcaccttcagttggccacctcagcagtggctcccgatttccacatcctgaagtcccagtctgagaatttgccagtttcccagtcccttctcttacccacccccccgccgccccccattcccaatctggaagtgtttatggcaagatggtggttagtgtcctagccttagtccccaaatcagggaccttgccaccacctcttctaacgcctgtccccgcctcctaaaggcatttgctttcaaagagatgggggtgtctccgcagggctgagctggctcacaagtcccggaagcatgtgtgaactcaaggctcagttgcctgtaaaatgtcgggttgatttcttggatcctatttcttatatctcagaagttgtacctttaggagtctcactgattaatgtgctaagagggatgtgtgtgttgagagtgggggtgagacaagtgatgattagagaggaaaaagtatgtcgttcccccatgggagatcaggattgcaaggtacagtggctgaatcccagtcctttgacagtgaggctgtttgggaaatacattttcttctttcttctcattctagatccttgcctatctttggaactggtcaaatctcagggggaccatgctcaggggtccctcccagggcctttctcccagtgtcctggtttccgtcaattttccaggagccccatatttcataccctataatgaaatcttctttttttttcaagggagttaaattgccatcacaatcccttaatcatactagtttatttcagaaaaaaacatgtaaatatctctttagtgcagtttacactattttgtatttgagagtttccataatctcttatctgttaaaaaggtattgttaatatgtattaattactgtttattccttattttgtatactttcatcttagttgattttttaaaacgtcattagcaaggaccaactttaaatatttaaatattaagatttcctttgtaacagttacgtttttggctctgtaagttattttttaccccagcaattgtgttactttaatcttgagtttttttgtttttttgagacagtctcgttgtctcccaggttggagttcagtggtgcaatctcagctcactgcaacctctgcctcccgggttcaagcaattctcctgcctcagcctcctgagtagctgggattacaggcgcccgccaccatgcctggctaatttttgcatttttagtagagatgaggttcaccatattggccaaactggtctcgaactcctgacctcaagtgatccgcacgcctcggccttccaaagtgttggattacaggcgtgagccaccgtgtctggcctatctttagatgttttttaaaaactagcacataatatcaaaatcatagcctcttcgcttgtttttctgctcttctttttctgttggtgttttgactatcaaatcgatgttcaaatctttaggttccccctctccctctcattcagtttaaaacttcatttttcttcattttgatctttaaaatgcctggaggtagcaaattactttaaattgtttccagatactacatctttttgggactagtttggtagccttaaggctaagcatcctggcatagtgttttgaaagtgttgaaaatgaacttggtcatatattggaagaaatatgaatagcctggcatgttagaaaacagtgtcattttaaacataagtcagattttgattctgtgggtgaagttttgtgattttgttttcagggacagctaatgtcaaagcagaagagctaggtgaggttcgtgatcaggaactcggtttcttcaatatcttgtgctctggctgctagagcagtcaagagtcagtatgacttaggctgaaaaactgtccacagagctaggcatggcaacagcgtgctactttttcatttggtggccaggacttatcttcattgtcatacaagttatcttggatagagtggattcctaaatctggaacccagatgttgagaaagtaggaagtaacttgttctaatggaaagaattaacttgaagaatatggcatttgaaagacctgacacgttcttttatttggcctcactaggagttctgatcttgactagaattaatttttgataattcagaaaatttagtttcagtcaaaaactaattattgagtacctagtgagtgatagatactgtacactgtgttaagtaccaggacataaagaagtgataagatcagaagttgcttataagttacatgagggagattaagtatgtaaatataaaacttcagtgcagtgccttggttcatcagagggtgaacatgggcggtcattgaagtctatgtgctctaccagatcagtttgtgtcactcggaaagtgaagacgattgacaaaccttgtctccgaagacttggaatgaaattgagccactgacacttcatcgccagagttacccttttgaacttctcctctgagcatgtgttgtgacgttgcattctggaccatgaatagaagacattaagtcaagcaatactgttcagctttagtttcatattattgcttcttaaagtgaaaatttagcttcaaactttatttaaaagctttttttgtttttttaatttttagagacaggttttcactctgtcgcccaggctgaagtgcagtggcataatcatagctcattgcaaccttgaactcctgggctcaagagatcctcccaccccagcctcccaaagaagctgggaccagaggcgcatgccaccatgcccagccaattatttttatttacttttttaacagaggtgaggtcttgctttgttgcccaggctggtttcaaactcttggcttcaatcattcctcccacctcagccttccagagtgttgggattataggcataagccactgtatctggcctcaaactttattcaaaacagaaggggaaattactaaatattatgacaaagaaaacatataaaaatgatattataaatcattttacattcatataatgctttaatcctctccattgtaggtacttgttagagtttagctgtctatggatgacaagtataaataacccaggagctcatccatcgtctttattttagtgaaagatgaaaaatgtacagttccaaactcattatcttgggagatgcaatcctaggtattatatgaaagtttctctaacaagagagttgtttcagttttcaaacagggcatacattaaggttattagtttatgttttttattatctacatccactagaaatagaaggacatattttcagatgtacctaagatttttgagtgaagtatataacattcacttactcaaaacccaccaaaatatgcctaaacattcagtttccaagcatacgattgagagggaataacatcttgactttaaaaatggaagaactaaggatttattcctgatattcctggaaatatccttccacagaaactgaaaaatgtgctgaatgcagcttgacctgattcttacttaaaaccaggtcttgactggagcagggaagggaaggagagccccacatactctgctgcagctgaaggtctagttccttcgttcctatccacagggactgagcagggaaggaaaaagaaggtccttcctccctcccttctttctgggttctgtcttttatctgcttgaaagttgtgttctatacttttcttggagtcaggtcataatatttgcttaactaaatagcaagaacctgagatttttatgttctactcaaagagaggttattgctttcccttccctgcagaggtttttagaggagctgtcctttcagcaccctagtactgaatcatgtcttttaaacctccctgcatttattttttcaatccctcctgcatttaaatgaatatttaacacctactgtgtgtttacaactatgcttaagactggaggaaagaagggagggtacaagagaaagtacaatagttaaaattcccttaaggagaattcagatactcagttgaggaaataagaaaacagatacaaatttgttaagtaatcacacatcttttcatatgtgtaaaagctgctagaaaaacatgaatgttcctccctccatgaccaggaagactcttaacatgtatttctccaagagagtttctaatctttctttataacataggcatatttttctcattcatatagatgacatcaggcacaagttagtaataagtctggattcattctggggctcagaaactctcaagctattttgagcaagaaagagatttagcacaggaaattctgtgcttgcagaattgttggaagggctgagagaagaggctctcagctggacctatgtgaacaactcccagaacatagcagaactggcccaccaggtcagctgctacttctctaattgggaacatacagaatcaggagctgccattgaagctgttggcttcaaaaacaccctgttgtgtctgcagcccagagattaggcaaccacttggctatgaaacattcctctccacatctacagacttagtgattggacaccaacatgctgatgcaaaaaatccctgcagcaagaacatggtcttcatctcacttctgcctttcaaatattgtgcatctaattggcagaatttaatctgcattcagaactttagctgtaaaggagtctgggaaatgtagtttttagcttcctagcctctgtagtactgaaatttgtgctagaaggattatggaatggatgccgattgctagtctacaatgttctgccatgacattcattcttcaggaagattgctggataaggtgataacctctttaaacagttggaattttgaggtcaggatgggctatactttttgtatatctaaagactatccactaacatccacctaagagtttcctttgtgcagactgccagttgcattacaaaatacagatgggctaacctcagatgggatagaggtgctataattaagcaagaacagattttttagcaccaccagcatctgagtggagaacggaggcgttacagggctggctgagtaaggaagggaatagtcagcagtggcagttcctcttttggtcttgccaaaagttcagaaatgtatctttgttttcttagttttttttttttcagtgaagtgtgattattttctgtatttgtttcagaaggtctagttccagttcagtttttttttttttttttttttttttaagatctgaatttggtttatttcctcctgagatagtgtgttagtccattcctgcattgctatgaaggaatacctgaggctgggtaatttataaagaaaaaaagtttaactggctcacggttctgcagcctgtacgggaagcatggcaccagcatctgcttggctctggtgaggcctcagggagcttttattcatggcggaaggtgaagtgggagcaggcatgtcacgtggtgggagccaggagcaagagagaaaaaccagataggtgtcacactcttttaaacaaccagatcttgtgtgaattcgagcaagaactcactcattactgtgaggagggtgccaagccattcatgggggatcggccctcatgacccaaacacctcccaccaggccccaccgccagcactggggcttacatttcaacatgaaaatcagagggttcaaatatccaaaccatatcaagtagattttttttccattttatttcaaggatctcttggttacctacaaaatgtttggcatggcaagtgcagtggtgaatagggcagacagaatctctgcccttgtgggtctcataatctggcctggacaataggcattgaacaagtaattaagtaattataatcttgatgcctcttgtggaatggaaactgccatggaagtgtttgataggggcctgacctcatttggtcttggtgatggagaagttccactatgaaactgatatttaagacctgaggtatgagtatgaatcagccaggtaaagacaaaagaaaaaagaagatagagaacagggtttcatgcaagaaacaaaacacactttgctcatatagcacttagcaccacatgtagctcgctttataatcactggcagctattattatctacccatgaaagcctttccacacacaacaaaatatataatcaagtaccttaggttcaaattctggatttgggaaggagaatgattggttgggatactgggtgggatactgggatcatcagggcttgaactgaggcacagatgactgctggagtaagatatctcttatgaggctcctttcccatgtttcagtctccaggtccaggtagaaccaagttctgaaagtctcccaaattgactgcgtactccctatattcactgctgctgaggttcagacctctgagctgcaaggcctccttagggggtccttttgctgttgggtctgtgtcctccaggttagtttccagtggctgccagagttgatttcctttctaaattacaggtctaacaacattccttttctgaaagatacatgactcctcttgtttacaatgtgatgttcaagcccctcagaatggctttaaagacatttcctggcctggttaccctcaacaaggctttgagcctcgtctccaatcctgatgcacatgacctggccacagcagactccctggaggtcctaatataccgtatacttcgtactccatgttcttggctcctgtccttccgtctgcctgattgtccttccctgccctgatttccttcatcgcctgagatctctcccactcactctttagggccaatttcaaatgttgccttccctgagaatcctttccccactcacccccttagtgctctgtgctgctgtgggagctagtgattttcctaagcctctaatcatacttctgcagaagctcttctcatcctatggtttggttgttgggtgtctgccttggcactgagttgggtgcttctcaccactgagtacacagtaaagctgagtaagtctcaaagaaaggatctcggccaggtgcagtggctcatgcctgtaatcccagcactttgggaggccgaggctggaggattgcttgagctcaggcattcaagaccagcctgggcaacatggcaaaaccccatctctatatttaaatgtattttaaaggaagaaagaaaagaaaaaaaaggacctctcccatattccctttagtgacaatagttggttttggtacaggattctgcatgattttccaggtgggattttttttcatgaatgtttatagaatgcctaccatgtggtgactgtcactaaggaaaatgcaaaggaaaataagttgattgcagttcctgcccttatggaatttgctttataatggggagacagaaaggcccagtaaacagacaacttgccgtgtttacccactcaggtaaatgaaaggttaaatacgatgttttcaagatgtttttgacttgcttctttttttcttccctttctcagtgttagaaattgattttgcggagctcaccttggaagagattattggcatcgggggctttgggaaggtctatcgtgctttctggataggggatgaggttgctgtgaaagcagctcgccacgaccctgatgaggacatcagccagaccatagagaatgttcgccaagaggccaagctcttcgccatgctgaagcaccccaacatcattgccctaagaggggtatgtctgaaggagcccaacctctgcttggtcatggagtttgctcgtggaggacctttgaatagagtgttatctgggaaaaggattcccccagacatcctggtgaattgggctgtgcagattgccagagggatgaactacttacatgatgaggcaattgttcccatcatccaccgcgaccttaagtccagcaacagtgagtatgaagagatggggctggaggggctcagagcagttgcagttgtatcccacgacgtcagtaggagtggacttctaatggaaccttagagggcagtgaaactccttgcttaaacacattccatccttgaatggagatgtaggaggtgagatgagtgccaagaaagattggtttaggaagagaggaaagaggcgcctgaggagtttgggataattttgagcttttttttttagcagtctagagtggccttccctactatttttccacatatcagaatgtgtaattctgatatgctgtgcacaaaacttgtgggaagtgtgaatattatcacaaaagggattttcctctttgtggaacaagaggtagagcaagcctttattatctgtttgaatgtttacctaaacacctcaacttgagatacccatcacagaagggactgtaagaagagaatgctattctttaaactgtgagctgattcaggtggtgatgtccatttggagagcatgacttcctggtaatatcaccaacctcctggtagcccaagggtggtattaattaaatgccataattacctagtgtttaatagcagggaactgagaagtaactctttattaaatatccagaatccataaactggatttaaagcaagtgttaaatattaaatggtgagttggtagaagctccagtccttcacgttggctgactcagcagggctaggaatacgcttcttttctgtggtagtttgtgctctctcttgcctaaactgggtggtaaagaggacacaattgcataatggtatgtacttaaaatcacttggagcatcctgtcccagagaggagggcatttgagttgaaggactttgggtgggggaagcatgggcccccagggacttcactctctttgcatccttcagctttgagcctggaaatccttcagactttgttttgctccaggctgttccagatgtggtttatttttctgttgatactatggtgaatctgtttactttaaaaactacattttaaggccaggcgcggtggctcacgcctgtaatcccagcactttgggaggccaaggcgggcagatcatgaggtcaggagatcgagaccatcctggctaacacggtgaaaccccgtctccactaaaaatacaaaaaattagccggacatggtggcgggagcctgtagtcccagctactcgggaggctgaggcaggagaatggtgtgaacccgggaggtggagcttgcagtgagccgagattgtgcctctgcactccagcctgggtgacagagcgagactccatctcaaaaaaacaaacaaaaaaactacattttaaaattatgtaagtagtggtggggtgcagtggctcatgtctgtaatcccagcactttggggaagctgaggcttgagggcgaagaggattgcttgagcccaggagtttgagaccagcctgggcaacatagcgagaccccatctcttaaaaaaaattatgtaagtagtaagtgtctattgtagaaaattagaaagtgcagctaaaaagaagaggaagttaacctataatgtttccctttagagagaacaactattacatttggcatatccttcccgacatttttaaagcgtatctggtttatgcatatacaaatatacatttatcttttctacctgtgttcttttcccccttaataatagaaaaactccttcttgtaagggtatggaacattagatatgtattttagatatgatgcatgtgaagtatttaagttacgtaaaaaatctggtttctctttttccctttgccattttcctgtctctttatcatgatgattttcatccccgccccacccccactcaaattctattctttaaataaattaaaacttttgggccgggcgcggtggctcacgcctgtaatcccagcactttgggaggccgaggcgggcggatcacgaggtcaggagatcgagaccatcccggctaaaacggtgaaaccccgtctctactaaaaatacaaaaaattagccgggcgtagtggcgggtgcctgtagtcccagctacttgggaggctgaggcaggagaatggcgtgaacccgggaggcggagcttgcagtgagccgagatcccgccactgcactccagcctgggcgacagagcgagactccgtctcaaaaaaaaaaaaaaaaaaaaaaaaacttttggtgacctcttttcaaagtaatttctacctagagattgcttatattgctggaaaatgtgatggagaagctgaattttctttattttactttttctaatatttttatcatgttgagagaagtaggcaaagtactgtaaagttacataattgaacccatttagaaagttgggctaggataacaaagttgtaaaagttaatagtttacttgatgaagttttgaatttgagtataattttaagctcttcatacacgtttttacctcttatgagatttgtatttaggagtggaggctcttatgcaggaaaagttaccctgttaaggttctgctgtttgtaggagagggcaagagacctgagtgtcattctgttattcaggagacaaaactctggtcctttctttttccttatgtgggttttaggattgccaaggggagccatcaggattgcagaagttgtataatacttaaacattcggcagtattttaaaggacattctcaatacagttgctgcccagtaatgtttatggtccattggactgcatggttggcgctgatgttgatgctagttgtaaatcttacatgtgtggtggggtagcactttgacgtttgtctgtgggtggatgtttgccaaggattgtatacgtctaatatgagcctcgatgataccaccattcttactccattgcaatgtgtacatgacttgaaaatgattgtattttatttatttattttttttagagacagggtctcactttgtcacccgggctggagtgcagtggtgtgatctttgcaaccgccgcctcccaggttcaagtaattctcctgcctcggcctcctgagtagctgggattacaggagactgccaccacacctggctaatttttgtatttttagtagaggtggggtttcgccatgttggccagcctggtctcgaactcctgacctcaggtgatccacctgcctcagtctctcaaagttctgggactacaggcgtgagccagtgcaccaagcctttttttaaaaaattttattattattattattattattttaatagagatgggagtcttgctttgtggcccaggcttaaaattatcttagaagtgttatgccacttctttgcccattgcctccagcttgggagccataacttctttgtattttatagacttgggaacactggtttgttttccttgctttgttaagggttccagagaattggattttggtcattgtcatgtgagggcagaatactaggaattatatgtgttagttgactttgaccattcgagaaaagagtatgtatacacaggagctgtctttgtgggaaagagaaagcagttgatgataaacccctagctgttagaaaggttcagtaaaaagtgtcttattaaaatgttttattatcttggtcatctactttaaaaagtcatttgcagtttactggcagtgaaacgcgtatggcatatagtatcctatgttgatacagaatctgcattgagtttagattgaccgtacgtagcccgaaaagccaaaccaaataacagcggctaaacaaggtctacactgacttgtctttgaaaagaagcccggaggattttagggcagctccatattgtcatctgggacccaggctcctatttttcactccctcatcccagtacttggcttccatcctcattgtcaccctgtggtccagatggctgctggactgccagttatgaggtccaagtcacaggcctgaaggatgaggggaagcagaagcacagaaaaggtgccccatgtggctgagttggctcccattaatctcccggaagtccagcatggcgtatgtgcttgtgttaattggacagagtgtggtcgcctggccatcactcgctggagaggagacagggagatggaggcttttatgctgggtgtcattgaacccagctgagaatcaggatctgttatcaaggaagggcattgccgctaaggaattggcagctagcagtcttaccatggaatcttaatgcaggacatgcatcggtatgaactgttacctcagatgtctagcatcatacagccaaacaagtttagccaggccctgggacgtgtggctcagacccctggcttaactactggtttatactactttaccacatcacatcattaacttaagcatcacgccctaaaactacttgtaaaaagcctctggctataaaaatggatttatgtgtctcttctccatcaaattggggaaaaccagttacatgatagttagcaaacacgttgttgaaagatggtcttaaatggaaaggttgtccttttgggggcaggtagatgacttcaggattttgtatagtaggtggcttggtgtaacggcattgggcagaagagcagtttaatagtggccattaaaagttatataagtggccaggtgtggtggctcacgcctgtaatcccagcactttgggaggctgagggaggaggatcacccgaggtcgggagttcaagaccagtctggccaacatggtgaaaccccatctctactaaaatacaaaaattagcctggggtggtggtgggcgcctgtaatcccagctactcgggaggctgaggcagaatcatttgaacccgggaggcagagattgcggtgagctaagattgtgccactgcactccagcctgggtgacagagacagactctgttaaaaaaaaaaagaaaaaagaatgaaaaaagttaaataagtaaagatatcaatattcaagtaatatgaaaaagctttggaaagtaaaaacattgaaagtgaaggtattctcattacttttatattcatattaaataactctttccttctcttagaaaatgcagaaaagggctgggcacagtggcttaagcctgtaatcccagcactttgggaggctgaggtgggcggatctcttgagcctaggagtttgagaccagcctaggcaacacaacaaaatcccatctctgcaaaaaatacaataaaatctagctgggtgtggtggtgcatgcctgtggacccaactacttgggaggctgaggtgggaggatcgcttgagcctggaaagttgaggctgcagtgagcagtgattgtaacattgcactccatcctgggcgacagagtgagactctatctcaaaaaaaataaataaataaaagaaaaagagaggctgggcatggtggctcacgcctgtaatcccagcactttgggaggctgaggtgggcagatcacgaggtcaggagttcgagaccagcctggccatcatagtgaaaccccatctctactaagaacaaacaaaaaaaatagccgaacgtggtggcatgcgcctgtagtcccagctactcaggaagctgaggcaagagaatcacttgaacccgggaggcggaggttgtggtgagccaagattgagccactgcactccagcccgggcaacagagtgagtctctatctcaaaaaaaaaaaaaaaaaaaaaggaaaagaaaaagaggctggtcacggtggctcattcttgtaatcctagcacattgggaggccgagacaggtggatcacgaggtcaggagatcgagaccatcctggctaacacagtgaaaccccgtctctactaaaaatacaaaaagctagccgggcatggtggtacgtgcctgtagttcaagctacttgggaggctgaagcaggagaattgtttgaacccaggagacagaagttgcagtgagccgagatcgcatcactgcactccagcctgggtgacagagtgagacaacatcttggaaaaaaaaaagaaaaaagaaaagaaaaagaaaacggaaaaacaggggtaaaaacactgtgtgtttttccagtttttctgtgcatttttgcatgtttatttttacccctagataatagcctaacaaaaatattgcttgtagcatgtgtttctcctccctctgtcagtgtgttgtcagcttgtggccctaatcactacactcttgcctgcacactcctgttggacagctggggtatttcattgttgttctgtgtggcctagtgctttagtttcatataattgggaataacgtcgttctgctcacaaggccacagcatccactttgcattaatgtttgatttatcccctgcctgtaccttctttgggtttcaaccaactcattcttaactttatagctgaaagagcagaggtgagtggtgaactgtatttggtttggggctaggcacacctgtcttcctcttttcagatgtcagcttaaatgatcatgagatctttgctgccttctcttcttctagaggcactttcttctttagccaagctggtctcccctttcctccttgctggcaggggtgccctcgcctcatctctctgcctgtccaacccttccgcagttttctgtgctcagttcaaacctggctgcttctggtagcccatcacatatccttgctgtagtcagtgctaagtcatcatttgatgaatgtgtactacctggtagttcgtagaagaatattggagtgacaagagactagaacccctggtctaatggctgcaagttcaactgccatccagccagggtgagtcagtttaaagcactggtaggcattcataggccataacgaaacaaaacaccgtgctggcctgtaagccaacctgccaagttacacaacctggcctctttttttggctatgatttcaggagcatcccttacatctccaaataggttttgtgtctttagctcccagcatagttccaggtgcatagtagggtcctcaataaatgtatagataaaaggaatgaatgaatgaatgaatgaatgaatgaaatatcatgtgaactggtttacttacgtgatcccaaaatgtaaatgttccctttctcttacccatgggtgtcattcagacctcacttgtgtggaattatttatttatttatttattttattttttatttagtagagacagggtctcgccgtgttgcccaggctggtcttgaactcctgggctcaagcaatccacctgctttggtctcccaaactgttggaattacaggcgtgagccaccaggcccggccatatggaatttgcttttcatcctcgttagagtcccctggcccttgatccatcttaattgtctgagcccaaccacctgttttggatgctggagtgtggtgttgtgacagtacattcgttattaatcccaaacgcctctgcctcctcccctcttcacacttttcctgatcaccagccctggctaactcactggcccacgtctccactgtagccagttgccggctgctaggagctgctggagccgaccactgcccggtgctgtcgggtctactcccagtctgttctgtccaacctcagtactccctttgttcccaacttggggactgcctgtcacgctcctcatggtgcctgttccagttttgttgaattgttggattggctgctcctgttggaactggaggtccatgtagcatctccctctccaaattctgttcacttgcaccttgtcctcgtctccaaccttctcttggagttcacaaggtcaggaagctgaagacatgctttcaccagtgtgaggatgatagagattttgtcttcccattggcctcagctcagcaggctctaacattctaagccctggagtatacctggaccacacactagccaaagctcctgactggttttcctgtgtgggatttctcatggctggtgagtttgctggctgccagacctgtggcaccctgggacccactggatcccagtctctagtgtcgtcctgcacgcatggtagagcccattctgcctgatggaggaagcagctaaggctcaggcaccctggtcagggatgatgtggcattagacttgcctcgaaaaaggatgaggagtagctgtaaaagcagttttttcctacaagagaatgaaataggcaggaaaacattcccagagtggacctggaaggcagtgaagtatcatctggaaaacccaagtcttggtcctttttgagaggtaagtaaatgactttttgtatgcttcatggaggcctctccaaatgaaatacttctggcattacctggctcaggtacttctgaatttcactccctgtttttttccttagtcaggtcctttggtggtttttgccacatgttccttcttaacagagagttggaggatgatggatgtgttttgaggattttcccaggcaaaagtgtacaagcgctcagagaattggatttatcttttggttgcaggaggctatgccagaggttagctagcagccacctggcgtgtctcagagcatcctgttcagttgatgggtagcgtttcctatgaatacagagatatgttctgcaagccaaaataaatacgtaagtgaataaagctgaaatgaagcaaataaccagccgggtgaacaggactcagcagaagaaaccattgaggccggagatctgacttgcaagtcctgttgcatctttcagttcttgaacgtggtttgggaaccttgcctttcccttttgtcctgtgcctttgtggccatctcctgcacaaagttggttttcttttatgggccagtctaagtcctggtgttaagaatacagcaggaaacaaaaaagacacaggccctcctctccaggagctccctgtggggtcagggggaaagaccttgatcaaaataaagtggcacaaaatgtaaagtcaagactgtggtgagtaccatgagcatggctgataacgggacatgcctcgagaggagtgctggagaattctctgaggaagttttgtttccgacgtgatctgagagaggcaagagtggagacaaagtggaaagggaaggtggggcaaggaggttccaggcagtgaggccagcaggcccagtgccccgtacagtgtggcctcctgggaggcaaattgcgtgcttggattctcttgcctccatcctttcctgtggttggtggagaaggattcgtaaggggaatggatctctttgtgggccacgtgccttcatttcccagcggttgctctagagttctgcctgcctcttcttcctatttcatcaccgtggaggttctctgcagcttactcagtggggcagcaagtagctcaggacaccaggcaacttttaagctctcataatgctgtgctggagttggagcagaagcttgtgctgtatgaagggccttggttggggtttctggaccatgagcttttagttgcagaaaacagccttggtgaggggttgagttcagggcaagaaaggctttgaaaggcgtgtggggtctgatttccagatgagtatttagtctcttcctctttgatctgtttcctctgatttgagccactattgccttgaaagtaagtaatacattttattgtatcttcccttccccacatccctcccaaccaaacctggtaagagctaggtattgaccacagtttgcgggtggtctgtggcaccgtcattgttcaggttcaagatttgtccttcaggatctctgaggagatgagagaagagcctgcctatttctcctttcctcctcatctcttggaaaaatttccattccttaacctggttcttcaccttgtttcgatgatgtagctcagggtcacttatggatggcacacaaagcagtgatgtcagtggtctggttgagtcaggagaaaaatgtagcttctatcccaggtccagggagcccaggtctttactgtggagtccccttcaatacccctgacagcctcttgtagaaccacactttgttcctcttataatgtaaagattaacatagggccagggaaccacgcaaaatggttccatgcaaaatgtggatacattcattttggagggaaaaggtcagggctcttattattgtaagactcagagaaggttatgaatcaatatcattacagataacttaaattgggcatctgtgtaagaggtgttctggtgcagtggaaagaacgtgggccccagggctgtccttgacactgactggccgggtggccttgggcacgtctgtgatctctctggacctcagattcttcatctgcaaaatgaggggtttggacaggtggtctctgaggtcctgcccaggacttaaagcatgaatgtctgtgtatttgggaatgttagtgactacacggtttgtctgcctgtgcatgtcaggctgctatgtgctcaggttccccacttcggggcttgttctggcttgggctgaatctactgaaagggaatctttgctgagtggtttagtggagaaaacagttgacaggagcccacaagtggtccccttcccccactgctgctcagggcatgacagatggccttgctgagagaagatgctctggtcacatgaaccatcctggagattcacaataatccaaggacagccttcctcctagaagcaggacacagttagtcgcctgctactctgtccttggagctaagcaaggggcatcctggtgtctcggagctttgctgctgctttgatttacacttgcttcctgctcacttttttgaaacaacatagggcttttccaggtggggctcaaggtcacttaggcgactttaattgtgtgcctcatatatccccactgacctgcagaataacaggaagaacatgtcccctgtgtgatccactatactgtaagagtgagacatatacattagacatattaaaagctgtgggttgcatgtccctttccctcctaacttccctaaagtttttgctctctataggaaacttgaaggttttgatctgagaagaaaacattttccccttaagattggttttgggaaccaccgtggtctaatggaagaaacaccgccttgggagttagatagacttggatttaagctacttcttgagcacttgacattgggcacgtggccaacctcttggagtcacaggaaatctcatccgtaaaatatgaacaacacagaaatgagcagtactgttttaagatgatatgagctattatgtgtcagtatcacacaggcactgcattcagtaaatggcactgtgctttttttcctttctaaggagtaggagaaacttctttccattccttgttattttagttgcacacaggatatggctgaatttccctttttaaagtggtgcaagaggattttaggcagccctgagtagccctctcctaagccagccaggcatagttttactattcccaccgaaacaggcagatttaattctgctgaagcccctgaaagggattgagccccaccagccccttctaactgtgcaaaagcctcttgtggaaacggcccgtgcgtcttgaaccctctggactcagccttaactcgaagtgcttggtcctctgaaaaatgcagcctcgtcctgtctgttacagcctttggcttgattgaatgggacagctggccagttttatggctctgctggactctcagttgataattaaaatgcttttgccccaggaggaaggcaatatatttatttccctcccttctctgctgcattagtctgcttttttcacatcttctcctggcctccctatgtcaacttagctttcttgttacacagtgtcatttaagactctggagtattcagggtggattgaagagattttattttgagttttgtggtcttgttttggaaggtaaacggagcatgtctggccctttttcatctctgtataagagctttgtttcctacagctactctctaaatctggttgtgtccagcacttagtaggtccttaagaaatgtttatagttttgataatcacagattctagcactgtgtctttcccatacatacctccttcccgcatagacattctccaaacaacaccacacctcttctcctttagagccctcatttaggatgtgaaccctctcttcttttggggatgagcccatgtgaactgtgggtgaaactggatttgagtcttacctggctctgttacttgctagctaaggaccttgagcaaatgatacaccctctgtggcttagcttttgcagatgtaaagcgggaataatgataataccaccgatctcatcttacggggtagaagtgaggattaaataagatcatctaggtgaagttcttaggagtgcctggcacgtaataagcacccagtatattgaccattttaattataattccatctgctacacttattcccttagtatttagatcacaattggtgattatatttttgggtggtatcttttgtcttgtacttgcattttcattgttttagtcatattctttccagttgtactgtagaatttaaaaaattcaaaatgtagtggatacacatgggtaaaaataggacaaaattgaaatacaaagaaaagtctgtctccagaaaaagagagagaaaaaagaaaagtctctgtccttccctcccaaaccctaagtttacttcttagaggcaaatgcgattaagtatctttttgtctctgataactttttttctatgaaaacatagaaatcccaatagaattctggacagcagaggtgttgctgtttttcatcccttcgtcttcccttgctccccccatctctgtctcccctcacatcatccctagtataggacttcgcatgtagcagcccaggtgtttggtggcaattccaatgtggccaaccaaaaaatcttgttttgtttgtgtgtttttttttgtccctagttcctttctggatggactcaaaacacttttactgaatgagctttgtttgttctcttcaagcctttgcttttatatatctatttcataaacttctcaggggcttgggaccctagaggaaggtgttccttggagtagcttgtaaagtcagaagcccaatgtgtgtctttggaattgcccagctgtgaaggtactgactgtccatccatcccttggagcaggtttgggagtggggcccattgcagcaggtgggcatcaggatgctggcaatgaccgatctttttttttttttttttgagacagagtcttgtactgttgcccgagctggtgtgcagtggtgccatctcggcttgctgcaacctctgcctctgaggttcaagtgattctcctgcctcagcctcccgagtagctaggattacaggtgcccgccaccacacccagctagttttttgtatttttagtagagacggggtttcactatgttggccaggctggtctcaaactcctgaccttgtgatccgcccgtcttggcctcccaaagtgctaggattacaggtgtgagccactgcgcccagccagtgactgatcttatagttaagatctttctctgcaaatccttgtgactgcaagctgatgtggcttatgaggcaatataacaggaaaaagtatcattgaaaaaggaaaaaaaaatagttatgctagattccagtgtgcagatacaactgttttcatctttatatttggctttcctattcttatctatatacctcatctcctcctgctgttttattcacggtgtacatgccatctggacacttaaaatttgtttttgtttctgcattctgttaaccttcagggtccaagaggaaggaggatgccttaatcagtgagtaccaagaaaaaccaaaaaactaaaaataaaaacaataaataagaggaaggagaaaaggactgtgggtagggaaaatagcgatagattttggattctggtcattcttgactttcttttttgcttatagatatgattagagcttactggaaccttacagttgtgaactagagaagctgagtgacttgcctaaggtcatcctgatgctcatgatagtgttccttcttttagcccgacaatggaacactgttactctgccaggctttccagctaggaccaaagtatttcagacaacagtggaaacaggatctgtaccccattcgaggaaccagggggacaatttccttgtaaggtcccaaggtcaaagtttggggtgaagtcagtgtttttcctggttactaacatgaactcggtctttggtatgttatgtagaaggataacagtgttcagtattcttctaggtggtacaatttttaggaagaaaagaataataaaaacattttttatttcttaagcagtagactcctggctccctgtgcttagagataggaatccccgctgagagatagatgggaatcctggagtggattgttaataatctccctgttattggcacagttgtgtgatagagagttgttttcccctctcccctgccttaggagacctacccttactaagtatttggattaaattaataataaaatagcttgctttgcccaaatgcacagcagctagtgacaaggggagatgccacatcacatcccatggatggcaatggaaaatcaactaaggacgtaaaattttcccacataagcttcagatgacttaagattattagtgtaacctgatattatctgatactctccttggcttattattcatggtgacagtaatacatggccctcatttccttcatcccccaaatagtcctagaggtagtagaaagagtatggtagtcccctcttatctgccatttcactctccctgtttttagttactcatagtcaactgtggtccagaaatattacatggaacattctagaaataacgattcataagttttaaattgcacaccattctgagtagcgcaatgaagtctcacgccttcccaccccttcttgtgtgggatgtgaatcacatcctgtccagcatgtccacactgggtgtactacctgcccattagtcatccacatggtctgtcctgacatccaaccattgacattgtcacaactcaatgatcccgggtcatccaaagcagacgatcctctgactacacatcagaaggttgggagtaccaaacactgtgtcactgtgtcacctcgcctatgtcatctaccgcgcacttcatctcatcacgtacccattttttcatctcataacgtcacaagaagggcgaatacagtacaacaagatcttttcagagagagagagaaaccacattaataaaacttttcttatagtatagttgttctattttattgttagtgttaatctcttactgtgcctaatttataaattaaactttatcataggtatgaatgtataggaaaaaacagtatatacagggttctatccatggattggggcatccactggggatcctggaatgtgtcccctgaagataaggagggactcctgtaatcatgctttgtatttggtcctttagaattttatttgaaacagtatctacctgaggtactccaggaagaggtggtagtatccccattttataacagaggaagctgaggctcagggaggtttaacaatgccctgcccaagaacacatagctagagaatgatagggcctggactcaaataccaggctcttgagtgcttgcatggttttctttctgctctgcttgttggaaacagactgcaataggagatccttctctagcaccttgttctgcaggacggaccctgtgactcaccagagtctgggtgcaacagggctagacctggacattaaacctggtcttggggactttgtggggtagatcatccccacatttcgaactacagataggggatcctttatttctccaacccaggacctctggtacctccagacctgatggtcctaaaatgcacaagacctgagagctagtttctcatttctcttttccccagggcccctccaaaagcacaatttgaacctcagccatccttctgtagcctcaggtttgcttcttcttccatctcactcactctgtctcccaggctggagtacagtggcctccacttcccgggttcgagcagttctcctgcatcagcctcctgagtagctgggattactgacgcctgccaccacacctggctaatttttgtattttcagtagagatggggtttcaacatattggccaggctggtcttgaactcctgtcctcaagtgatctgcccacctcggcctcccaaagttgtgggattacaggcatgagccactgtgcccggcttcagctttgcttcttgttagtgtttgtcctgaaccaaaattgtgcttgcatacagctgtccagaagttgggccatcgcagaagcttccatgttattgggctcttgtacttacttgtgtttgtgttgtggttttgttttttattttattttatttattttagtatttttttttgttttgagacggagttttgctcttgtttcccaggctggagtgcagtggcgcgatctcagcttgctgcagcctccacctcccgggttcaagcgattctcctgcctcagcctctcaagtagctgggattacaggcatgcaccaccatgcccagctagttttgtatttttagtagaggtgcaatttcaccatgttggtcaagctggtctcgaactcctgacttcaggctatctgcctgcctcggcctcccaaagtgctgggattacaggcgtgagccactgcgcctggccgtggtttgtttttgtttaaacaaaagaagtatatatagatttcagatacattcacagatgattgtttatggaatttaaaaaattttaaccagaaaagtaatataaacattcaaaaagggtttggacacgtctgttaattgcagagccctgtgtggttattcagatgccacgtctttcagctctgtgtagtctgggaggtgagcgggcctttctggggtgtttctttgcagctgaatttatggccaaatggaccatgcgtgagcaagagagcagttccattcctcctggaggagcgctgagcatgctttgtggtgcccacttaacacttttagatgaatactatgaaagacaaatttgacttcactgttcattccttgaagctccaatttggattgattgctggtggaataacacctggactatcaatgagtgaagcctcccggctatttccttcgcccacctcacaaagagaatttggattttgctgctcctggaactttagagctttgtgatgggaggaaaggggaggggacaaagagtgaatccttcaggagctcttttgggaggaattttgagcaggaaatgagggagcttctttctataaggacagtggatggaattaaaaaggggtatttgaggaagcgttgctgtggatcatatgaaacctttggatgctcaagaaaaataagagtcagactaatttgaatttactttaggatgccgtcttccttcccaccttaccgttgtttggacacagtactgtcctgggcttctaacatgtgagtctgtggctttatatgcttgactctagttgcatggaccatgaatctggccaattttaggtttcttacaagcattttgatgcttgatttgatgtgtagtatattggtggagagactgggataatgaccttccaggaagagtaaaagtgaccccactgaggaaaaataagatattctaagacttttccttacatgggcattcactgaaggcagagaacacggcatttgagcgttttcccagcagtttctgggtatgcctgttatgcccaccttccaggtagcagggaaggaaggaaaggactggctttcacctggaaactgaggtgtaacatctagagaatttgtatagttttgaattttccctaccatggtgagatcctcaactctgtctcatggggaacaggatttgtagagtaatattcagaggtagactaggaagatgctaggaagtctcatcttccccatgcaatggacatggaggtgggaggaaggaattagaaaagcatccatatcatagactgaaagacagtgagtcagagcaaagctagtcttggcctgaggaggtacttgaggttggttcctccctgctcttacatggagaggttgaaaagtgattcataggaaactttaattggtgtttcatagctttccagggctattaaggacttgtggttcacaatggcaactcccagtgtttcgagcctttgtggttgggacttccttgcctgcaaggtgatgggatgaaggtggtatctgtggtggcttgtaccgcttcctcctctgccctcaaatcctttctcctctgcaatgcctggggtgaagtgcaggtcacagagcctggaatgttttctttttgtatagatcatgattctcaaccgatgtgggtaattttattacccaaatgtcctcataagaaattgacgtgcctgctattgcatacatgctgtaagaaatacggtcaatttattatatacataacatagaggtcacttccactgcattctttccatccttaggagttgtgctatgtaaacacatcctaaacaaccagaacagtgtgatgtagtagggggcagcgtgtcaagatacatgagatggggtctggagaaggcagaattccctgggaggccttgatggaacaattaggcctcaaagaaggggtaggattcaagagttggtaatagggcaggtaggccatagctatgacctcccagggaaggcggcctgccccagctcagacagagccaagtgttcactgatgccatgtcccatcacctgggttctttaggcaattcccagacctggaatgttgactaggaaagccatgctcccaagaagttgagtcttccatgtgaaacagctcctctttctaagtggccagagaacctgggctggtacagttgtgggctggtacagttgtgggctctgaatcaggcagacctggctttgggcaaagtcctcgaccctgagcccatttcctcctctgtaaaatggggataattctagtatttactcatggcattataatgaggattaaatgaagttatgtgtgtaaacccttagcataatgcctggcacaaagtaaatgctcagtaaaaggtagtttttcctttttaaaaaattcaagagcagcagcagatatgagactagactcacagtgtatcacctactgtttccattactatttcttcagaacaaacgaccccaaacaagaacattttattaagctcatggagacttgggtcaggaatttggaaagagctcattagggatggcttgtcaatgtctggggcctcacctgggaagacttgaaggctaggggaggctgcagatggaggcaggaaccatctgaaggttgttcacacacatggctcagtgcctgagctgggagaagctggaggccaggactgctgatgggagtgcccatgtgcagtctgtccatgagcatggctctcttagggctcttggccttacatagtggctcaaggctgcagacccaagtgttccagtgaacatggggaagctgtagcatcttttctgatctagcttagaagtcgggcattgtcatttcttctgcattctgttaaagtgagtctcaagaccactcagcttcaagtggagaggacacagacccacctctcagtgggaaaagtgtcaagatcacactggggaaaagcacagaggatgggagatgatggaccactttgaaaatgcaaccttccatgcctgctaagggaactctgctagcagagcttggggatacaaggccctggagagcctgtgcggcggctgcaccccatggccacctgccaagaaagaactgctttctgttgacaaaaccatcgagcatctgataggcttcctcttttttggttatttttatctggtatgtagctgggtacttcagaggtatgacggagatctggcagctcttctcagtcagtttgagctgatacgatgagaaaattcaggggaggcaggtgtttaaggagatgttctttagtaaggaaagtggctgcacaaaagcctctggctttctgtttcctgctggtgatatctgcgcctggatgaggtgagggatggagtcccagctgtgttttctgggcttaatttgcacaagatggcaagggctgtaggtgtccaagttgacgccttttgaagcagttatattttaggatgttagagagagctaggtgtcctgcagacacgtgggaggtttggtcagggagatggtgcttattcttctgttttaatcatgagaacctttcactcagcagcatgggagatgtgggaagtgggtacggcctccaagaaagagatgaaagtgaagttcccatagaaagttggggctggttaaaggagtcatttttcaaggctgatgaattgtgctgtgcctacaggaggcctataaatatattagttccctatcatgtctccttctatcctccagcccaacaaggcagcagaaatccacacctcatgctgttaagtcatgcggcaggcatggatgtgggcacattatgaggaagcctggtgctttgggttgtttctccagtgctggtccacatgaatacatctgatttgttcccttgttccccagaacacatatgcacattatggccagccagagttgtttgggagtggcctggttcaaactatcaccctagtatcccaatcttgttaactaaccagcctgtctgaaaactttgcataaggcctgggtgcctgtctgaaggatcaagacactagccagccccaggaagctcatctatccgttctgtctcctctgacgtcattcttaggttgtgccattccctgagttccttgctgcatgcccttggctgacattgcaaagtgcattgcactgatacctgggggcttgccagagatgtcccaaatgaatgcaggactgagccgcgttggcaaggagtggctgttctcagcatgccagaactgtggaattgcatctggtctagttagtagcagtcagtaatatgtgagttggtagctacaactgaaaatgaaggaaccctgtttctaggtgtttgtggctgcagaagcttcagttcctgttggaagggaagagtgggtgggtgaatgttagcctagaggtaggaggagtgggaccactaaaccccgctgaactcactaaatgctagtatattcctgtgagattggtgacatacagggacttagccagagcaagtaagtgatgtgatgtcagagagatttcctaggactcatggaccactctttctccgtgtatgtgaaattaattactctgtctgactgtcccatcctttccatccccagtacttgagtttgtcattcaccattgtcccctggacaattgtaataggttacttactgtggctcactgccagtctgttgctttttcagtttaatttgtctcactgcaaccatagttgttttgctgaaactcaaatcttgtcacaacacttttctgcttaaaaactacttgtgactccagggtcatttccaagttccttggcagggtctgtagtcttccagtcctgccccagcccttcactgcggctccttcttctccctttctacctcatgaaagttctgctccagctacaagggactatttcttagatatgtcaaggcccctcagccctcttggacctggactcacgttattccctctgctgggagtggtctttcttctgattctccccctggaccaaaccctgtcctctcgttacagcacagagagcagttgtttattctgtgagccccttctaaggagccccttcctctgtacattctagtttcaggcatcctccatgttaggtgttcaaacaagatgggtggacggggtagggtaaggcatcatcaagagcatgagagtagccagtggtccccactttaccactttctggctgggtagctcaggggaatatcctcacttctcagccacagcttcttcatctgtaagtagagattaaaacagtacatatccgtaaatagagattaaaacagtacatctgtttttatataagtactgcacgtaaaatgcttagcatggtgcctgccatgtggtaagtgctcagtaaatgctagcaatgatgatgacagtgttataggtgtagacttatatggccagaatgagagaagtttggcctggtgcagtggctcatgcctgtaacccctgcactttgggaggccgaggacggtggatcacctgaggtcaggagtttgagaccagcctggccaacatggcgaaaccccgtctctgctaaaaacacaaaaattagccaggtgtggtggcacatacctgtaatcccagctactcaggaggctgaggcatgagaattgcttgaacctgagagacggagttgcagtgagcagagatcgcgtcgtgacactccaacctgggtgacaaagggggactccgtctcaaaaaaaaaaaaaaaaaatagctgggcgtggtgatgtgtgcctgtggttgaggctacttgggaggctgaggtgggaggattgcttgagcccaaggcagcagggggcagaggttgcagtgagctgagattataccactgcactccagcctgggtgacagagtgataccttgtctcaaaacaacaacaacaacaataacaacaacaacaaacaacaaaaaacaaaagggagagagagaggttccgtcctagtttcctttataggatcatctatttatccctctcttttcctttccttttttctgtgtaggtgactgtcgaccttttctagtaaccacagtggttggtatcttttaccagtttctgccaaagtaggtagattctcaggcatgcgtgttggctgggaggaatcttgattttttggagtgaaatcttggattctgtcctgattataattctggtcttggatgttggttatgtcttagaggctttagccctttccacccatggtgctggtgtctcttcgcagagaactaggtggacactgcattagtcagggtggggcctcatggtcctgatatatcttttcacagccaaggatctagtgtcttaagagttgacttgccagggcttgtgactctctggtgaccagtggtccttatgctttgggactccagccagtatcccctgactacttttaatagcatcagactggtttgatagggaagactttctgaaccctgggatgtgatggagcaaggagaccctccttctgtaaaataaccattccctctgcttttgagtatgtcaggagggtctttcctgggatgaatgagcagtgagtaatgcttctcccttggctgactatggttgctggtgaacagtggagctggggtccagaggttttggagtggacacttattctttgcctttctgatatatgagcctcagcctttctcaccactgtctaagagtgctttctgctgctctggggatgagtcattggatagggcacacattttagaaaagaaaaaagataagtggatggtgatttgatatggatgggggcaggaactggagattcccctgagaaatgactacccctttgaggtgggcattggtcgaagcaacagcgccctagagatgggtagaaagtgagagatctttggccgggtgtggtggctcacgcctgtaatcccagcactttgggaggccgaggtaggcagatcacctgaggtaaggagttcgagaccagcctggccaacaaggtgaaaccctgtctctgctgaaaatagaaaaattagccgggtgtggtggcaggcgccttaatcccagctacttgggaggcaggggcaggagaataatttgaacctgggaggcagaggttgcaatgagctgacatcaagccattgcactcaaacctgggggacaagagcgagacttctctcaaaaaaaaaaaaaaaagtgagagatcttttagttcagggtgtttcatagtttttatagcctagtgtcttaagggctgatgggagaggatttttttttaaatcaaagtggaggttctaggttgagaatgctttatttggggcccgagtgaacagctatatgggacctacctgctactgctagcgccaaatatatacctattttgagggtgaatctctaacggagagagcagagctttaagatcgtagggattcctttgctttattagtttttttctcacacttgtgaacatttaagtttttggttcctagctctcccactgaccttcctcatagtttatctggatataccatgtagaggatgaggcatggtattgaatttgcagggtccagcctgtactactcaaagcaaaactcaaaacttctgaaatggtttcagacctagtgtaggagggtttcttctcctgcccatcaacaccctccccgcaagccacaagctactgtctcagccatggtgcttttagcacatatttgtcctaaattatgcctggggagatgctgcctgccggtaagcttttgccaccacaccttgccaagctattagagtttgatcctgagtgtctgtgagcttcccaaatatttattttatttatttatttattttgagacggagtctcgctctgtcgcccaggctggagtgtaatggcgcgatcttggctcactgcaacctccacctcccgggttcaagcgattctcctgcctcagcctcccgagaagctgggattacaggcgcccgccatcatgctcagctaatttttgtatttttagtagagatagggtttcaccattttggtcaggctggtctccaactcctgacctcaggtgatccacccgcctcggcctcccaaagtgctcggattacaggcttgagccaccacacccggccccaaatatttagtcttaacttcttaagcactctcatttaaatataaaagcctagttcccttccctagaaggatatgaaataagactcaggtggtttggttttagtccaggacctcctgggttctagtggaaagggcagtggacttagaggtagaattaggtttgactgatagctttggtggcttctcttccagttctcttctgttctaaacacaggtttctctccttgtccctgccagtgagaagtagccattagcttgatagtgccatgtagagacccacttctagtgctgggctctgtgttcagtagtgttatgggcattggtccattccggatgtaggattcagcaaggttatgcccagtggatttataatatgagactgtccccaggcaaataaaagtaagttgtgggtcatacactgtggcctatgagagactggtattgtagagatgtatcttctcaacatttgacccccaaatggagggggcagcagggtatagtgaaaggagcataggcctagaagccagagcaagattcaaatcttgactctttcgcttcctagatgtggaaaagttacttgccctttgagtcccagcttcctcaactataaaatgaggatgctacccaacttgcaggatagccatgaaaactgcatgaggtaatgtggatgtgaagtgtctagtattgcacctgggacatagtaggtatgcaaaaaaatagtagctgctattattattaaataatttatgaaagtaacaaaaacacatgtttatcctagatgattttggatttcgacaatgatgaaagtgaagaaaaacgtttcgcttatcatcttatatactaatgttttattataatatagttacatgtattaagctgcctattatatcttttttttttttttttttttttttttttttttggggacagagtctcactctgtctccaggctggagtgcagtggcacgatcttggcttactgcaacctctccctcccagattcaagtgattctcttccccagcttcccaagtagctgggactacagatgcgtgccaccatgcccagctaatttttatatttttagtagagatggggtttcaccatgttagccaggatggtcttgatctcttgacctcatgatccacctgcctcggcctcccacagtgctgggattacaggcgtgagccaccgtgcctggcctttttgacatacattttgttgttgttgtttgtttttgagatggagtctctctctgtcacgcaggctagagtacagtggcgtgatcttggctcactgcagaggcaacctctgcctctcaggttcaagcgattctcctgcctcagcttcccgagtagctgggattacaggcgcccaccaccacgcctggctaatttttgtatttttagtagggatggggtttcaccatgttggccaggctggtctcgaactcacctcaggtgatccacccgcctcgacctcccaaagtgctgagattacaggcgtgagccaccgcgcccagcctgatataaaatatttgaagtgtcatgtgtacataatctagtttaaaaagccgaaatatattacaagccttgtaataaataacaaaggtctcctgctttatcctttctcactcactgactcttcctcctggctggtgatcttgaggggagatattggtttaatttacacggtatttgaacaccccttgcctatttagcacagtgcctgatacatacaggctttcagtacatgtgggttattatattatttttgaaaggtttaaatcaatacttagtatagaacatagatttcaggttgattaactttacggcagcttggagaggctatccaaatctttcattgtatcatactgagactctgttgactgggatcttggttttggtttagatttgcaattttgatatgtctgtgtctgttttgctgtagtaatgagcaagatattttgtaggaattgaactctgtattaattcagttagattagctgtgagaaatagacacttaaagtaacactagctgaaataagtgtctctcttgtatgtaaaagtttggcatgagatggccagtgattggcaagacatctctgttccatgagccttacctccttctcgttcacagctctgccaactcttggggcatgatcatgtcctcatggtccaagatggtagctagacctccagctatcacattcactttccagatagcacagtgtataaagggatgaagaacaaagtccaaaggcctagagctggaatcttttaagacaggttacagaaagcacctacaatgacactttttagttacctggctacatctcagaacaaggaggctggaaaatgtagtaaatgttctgagtggcctggtgcccatcttgcaattgtgggttccattactatgggaggaggggagaataaccactgaagggcgactagcagtctgggtcacagatttcaggctcttttcctatcattaatcccttgttagtccttccctgatatgctgccaggattgctaatgtagcaatccctttctgctgtgttttcaatttgttttctctttctgctgctgactctgtccttctgctttaacccttacttggagatttctctcccattcaccccttcagagttggaggccttgagacacttgcttggatgtgcgatggaagcagacaggtaattccttccttgggggcaatgacctactgctttctgcataacgtgcttatagttgcagcattgagatcagtggttcccttggggagagggttactgaaaggtatctttgacagtgtttgtataaagtgtaaatatttctgtttttcaaatgtgcatgggtgctgttttgttgagaaaatatgaattcacttagaagcattttcttagggtgtttagtattttcttagtgtttaatatggcatggtggtctggggtcctgactgatttcattcaggcctgggctgaatgaaatgtcctggcttcgtctcttcccacttgtagaccagcctgcctgaatttcagtctccatatctgaaagtgggcatagttatagtacctactttccgtattgatgagaggattaaataagattataggtgtaaatcacttagcttagcacctggtatgttggaaggactccataaacattagttgtggttattattttcttcttaatcaacacacactaaaagtacaaatagcatcataatggctttttttttcagctgaaaggacatattttgaaaggttggaaatcattactgtagcttctcaggggactccaatatggccagccctggaacaggtagctggggaccagtacctaaactgatttaagcagacaccttttgggatgatttgcattcatttgttaattccagatgaatgtttattgagcgcttattattcctcttcaggttataggcatagaaagggagaccactgtagttcagctttactctagctcaggaaaaggtcactgtattgaatgctctctctctctctctatgaggggtgttttgtacccattcatttgctttggtttcctcttttataccaaaagggagtgactcctaagtccccaaggagccaattctctccacctttctgtagttactgtggcagggactcttggctgctgtgcctgagtccttgttgggaagcatagctttgctggttgtgccagtggaacccggtgcagctctgctgacaatgcggaagctgctggggccaccgttgctgctggcgtctcccttccatctctaggcagcaccgcagctctgctgaggtcgagtcggggagtctaggtggtgaatcatttgccttggtaagcaagtctggcctctcttggccttgcctggagagacagagcgggcagagccccacgggccaggagaagctgggggatgcacagcggccgcactctggctccctggtagtggtccacgagtcaggctctctcatgcagctcttgctgcgtcagcacaacagggagcctgctatgtgttgggtctgagatcatcttccttcctccactggaggcaacgtgctgtaggaagcaaatatctcacgtgccactcaggagccctaaaggctggctgtgtctaatgaatagggcttttctctggggtagaatcacttcacctaactccttttccccctatgtttagctgttcttcagctcagatggatggtggggcttggctggctcctgggaaggactgacacagtttccagggagttacagactccaggaatgtcagaggtagggaaatgggggcctggtgaaggtcacacagtggtggagcgagaacccagacaccctgggtctccatctgttgcttttttctttctgccttggtgtagctcagagactgtttttattaaggtgagacaggatgctgtgacatagatctggagtttaagccctgggctttggcaggaacaagcaggagtacgtatatgccttcctctattacaccctcccaggatggattttgcatatcaggagagatggaagaaccaagtgatggaaagccggaagcctttgaaaagtttcctttgtaggatatgctagtttccttctccctaccccaagaaaacaaaactgaaggcacagttctatgctagggtagcagattgaacatgtgaaatgctacagctacctttactccctcctgaaacccagtgaaagccacagcaaacctacaaggtgcatgggagaagagacgatagctgttatgttttggagactggaaaactgatggagaagtggtaactgacttagaacatttgagaaagataattaagttgacagtagggaaagcaaaaaaaaaaagcaatccctttatatcacagaatctcctctactttatgcagccacttgactgccttttcttcttggaaagggtaaaacaagagttactggactggagacagcaagcacagaaaaaaataaataaaacaaaacatacctcctacgcgtcctttctaaggaactactggagagtacacaccaccgaagcaggggaaggaatcagtaaagaggggagtggggtacaggacacagggattaacacaggagggagacgaagggaaccccttaggactgtgtaccagacgtagaggatgggcagcttagatctgagcagcgtgactcagaatgtcatcaccaacttacctgcaatcattgtgccattgatttaactggaggactgactacctggggaagcctggggcagattgtatctgctcttggctgtcttgctcatgtgctgatgaagcttctgtcgcccctccttgccctgctgatggatagacgcattttatattaacagaagtgttttctttgcccaaccctcgatgctaaaggtaggtccatgtgaatttagaaacagaaaatatgagccaggcacggtggctcactcctgtaatcccagcactttgggaggccgaggcaggcggatcacttgatgtcaggagttcgagaccagcctggccaacatggtaaaaccccgtctctactaaaaataaaaaaaaaagtatctgggcgtcctggtgtgtgcctgtaatcccagctacatgggaggccgaggcaggagaatcgcttgaacccaggaagtggaggttgcagtgagccaagattatgccattgcactccagtctgggtgacagattgagactcaaaaacaaacaaacaaaagaaacagaaaatacagaagagtcccactctcgcaattaccttgacccctaccaccaggtgttcccactgtggttacctgccctgtgtttccaggacttgttcatgatcttgcctatcaactttcccaggaagggctcttgtaaattccatgggaatttcccagagactctgtttagcttattccctttgggaaggcttcatttagcaaaggcagtatttttactcctccatggtgttgtgggtagaatagtgtcccccacaaccctccacacaaacaataagttgaagtcctaacctgtgaaatttggaaataccatctttgcagatgtagtcaagttaagatgaggtcatactggattaggatgggccctaatccaatgaccgatgtccttataaggacacatagacaaataggagaatgttaggtgaagatgcagacagatacacaaagggaagatggccatgtgaagatggaggcagagattagacttaacgctgctacgagccaagggacactaaaaactactggcaactgctagaagctagaagggtcaaagaaggatccttccctggaacctttgaagggagatggccctgccgacaccttgattttggacttctaacctccagaactgtgagagaataatttctattgttttgagccacccagtttctgttaatttgttatggcagccctaggaggctacaacacacagcttcattttttgtttgccactcactttttcaaaactaaacattatcttatttagagatgtgtacatagctggtaaaatcataaagagaagtaaagaaatgaataacagaagtcacggttgtcagatgtttagggagagaggaaagggggtggtggagagagacacatggaacttctaaagggaccggatgggattatgtgggttttcatattatgttctttaaaccatatatacatttttaaattttagaaatggagtttcactgtgttgcccagattggagtgcagtggctgttcacaggcacaaacatggtggtgctatagccttgaattcctgggctcaagccattctcctgcctcagcctcccaagtagctgggactacgggtgtgctccaccactcccagccatatatacatttgtacatgttacatgtatacattttaatgtactctcctatgtgtataatacgtttaacaataaactttaaaaaataaaacaaaacataaccctcaaaaccaaattagctgagttacgtaatgtaggagagatggcattgaatcatctgaaccaaatgcaggcctgaggacatgagccttggcaccaaggtgagcatttagcaaattgaagcctcttgtactaatggagatgaataataaataagaaatctgaaaatgacatagatcatcaaccaaagctaagtttaccattaggacctaatgggagagtctcctcagtgatgccaagttttgagagcctggcctcagctaaatgatattaggtcagattcacaaatcccttagtggcaagacacccccgatttctcctgctgacctcctaatgggatggccttgagaccattttaagtggtctgcattaagcaacattgaatcccaaagaaagtcattcagcttttttgtgtaaatggaggatcaacattcattttggtgctgtttgtctgtaattcctctctaacacttcaaatctttcttctcaagcagagaaggcaggccttaggctcagcattttgaccatatgcgggtctgccactgtaccatttatttttgtttcattttatttgtttgtacaggttactcaatgttaggagaatttttggctttcccatttacaatagtgatatagaatttcttctttaaatttttttttaatttttaatttttgtgggtacataataggtgtatatatttttggggtacatgagatattgtgatacaggcatatgatgcataataatcacatcatggaaaatgggatatccatcccctcaagcgtttatcctttgtgttacaagcagctcaattatactttagttatttttaaatgtacaattaaattattttgactatagtcaccctgttgtgctatcaaatactaggtcttattctttctattttttgatgcccattaaatattatttaaataataatattaagtggtatatataggtggtgtcctaattgggaaataatcaagaatgatgtctttgtgccaggcacagtggctcacttctgtaattccagtgtttgggaagccaaggcaggaggattgcttgagaccaggcgttcaagaccaaccggtcaatacaaaaaataaaaaattagctggggttggtggtgcgcacctgtagtcctagctactcggaatgctgaggtggagaaacgcttgagcccagtagttcaaggttacagtgagctatgattgtgccactgcactccattctgggcaacagagtgagaccctgtcttgacctgatactcacttttgtcacattgtctttccttatagaaggcgaaaggccgttgagataagctgagagtcttcaggttatctttctctgtgtgtcccctacccgacctggcactaactgggtgtgttagtcactggtgaacccctggctgaggtattactctttctctagtctcctcccagtgcccctccaccccctaccccaatacctggcaacaataagatgggaaagtggatagtttgagaagatgcacagatatcccattggtcaagtatgtgaccagcaagagatgagttcttttttttttttttttttttttttgagactgagtgtcactctgttgcccaggctggagtgcagtggcgcagtctcggctcacttcaacctccgcctcatgggttcaagaaattctcctgcctcagccttccaagtagctgggactacaagtgtgtgccaccatgcccagctaatttttgtatttttagtagagacagggttttgctatgttggccagtctcgtcttgaactgctgacctcaggtgacccgcccacctcagcctcctaaagtgctgagattataggcatgagccaccgcacccagccgggatgagttctttcaaagagcctggtcctgtgcttggttcctaaaggggacatggcataggttccagaagaaaaagaatgaggtttttgctttctaggagtcatactgtatcacatgctagcggaaatgatgacacccatatatatgcagcagtcaggagtgattagaagtgcatatagtgttagattatgtggtatttggatgctgaaggaagaattcaggaaaaagaagtgcagggtagactaatcaattacagctttagggattaggcagaaatggaggcagggcttaaagacacataggatttctttctggcctctgtacggcatggcacaaaggtgaagaatgtggttctgaagtcagacagatctggatttgattcccttccccatccctcactgactgggcaactgacttaacctttctgtgtctggtttggagtgcataaaatggggaaaataattacacctactgctgaggggtgatttaaggattaacaaaagtgatggacataaacagcatcgtgctgctacgtagtaagtgacccataatgagtaggtgtcattattaatcaagcattccatttatctatacagcaaaaatgtattgcgtggttattgtgtgtcagggactgccaggccttccatatcagtcccttgagcgctgaaccctatggtttccatttatgtacaggatacctaattataataataactatagtgctccaagtgccaggtactctgctagttgctttattgctgtatcgcctttaatctttatccccattttgtagaagcaggaattgaggtacaaagtttaagagatttgtccagggtcacattaagagtgtcaagcctaggatttaaattatctgctcttttcctgttccatactgactcttgttacagtgaacctagacccattatgtccaaaactaaacttggcttcttcaaatgggctttttctctcaacttcccaattaggggcaccaccattcttctgcttgtcacccaaacctgaaaggctggagatgtcttccttctccatcaggcccctacatctggttaatcactgggtctttagttccaatgtatcttttcctttctgttccactgcctggccaggcccccattgacttacgcctagactcgttagttcttctcggtacagtcacacatcacttaatggcagggatacattctgagaaatgcatcattaggcaatttcatcatcgtgcgaacatcagagtgtacttatactacacacctgggctatatggtgtagcccaagcttgtcccgctatggctcaggacactttttcctttgtttttttttttttgtttttttttgtttttttttttttttagctgttgttggtgtattttatgtgtggcccaagacatttcttccaatatggcccagggaagccgaaagattggacacccctggtgtagtctgctgtttccaggctacaaacgtgtacatgttactgtactgaatattgtagacaattgtaatgcagtgctaagactttgtgtacctaaatgtatctatacgtagaaaaggtacagtaaaaatatgatataaaaataaaaaatggtacttctttacagaacactcaccatgaaatggagcttacaggactggaagttgccctgggtgagtgagtggtgagtgaatgtgaagacctaggacattactgtataccaccatagaccttataaacactgtacacttaggctacactaaatttataaagaaaacttttttttagacggagtctcactctgtcacccaggctggagtgcagtggtgcaatcgtggctcactgcaacctctgcttcccaagttcaagcaattcttctgcctcagcctcctgagtagctgggagtacaggcacggaccaccacacccagctaattttatgtatttttagtagagatgggtttttgctatgttggccaggctggtcttgaactgctgacttcaagtgatcctcctgcctcggcctcacaaagtgctgggattgcaggcctgagccatggcgcccagctgaaaaattttctttcttcaataataaattaatcttagcttactgtaactttttaactttataaacaaaaactgtttacttcttaactcttttgtaacaatggagcttaacataaacacactgtacagctttacaaaaacattttctttcttttatccttattctatgagcttttttctatttactttttttttgttgtttgtttgtttttgagagagaggtctcactcactctgccacccaaactgaagtacagtggtacaatcacagctcactgcagctttgacttcccaggctcaagtgatcctcctacctcagcctcctgagtagctgggactacaggcatgcaccaccacacctggctaatttttcaatttctttgtagagacaaggtttcactatgttttccaggctggtctccagctcctgggctcaaacgatcctcccaccttgacctcccaaagtgctgggattacaggcatgagccaccaccctcagcctacatttttttttttttaaagagcctggtcctgtgcttggttcctaaaggggacatggcataggttccagaagaaacatcagcctacattattttttttaacatacattttttgttgttgttgtttttacattttaaacttttttgttaaaaactaagacacaaacacattttagctttggtctacacagggtcaagatcatatcacagtcttccacctctacatcttgttcctctggaaggggcaaaacacacctggagctgttaatctcctataataacaatgccttcttctggaatacttcctgaagaacctgcctgatgccgttttacagttaactttttttttttttttttgagacggagtctcgctctgtcgcccaggccggactgcggactgcagtggcgcaatctcggctcactgcaagctccgcttcccgggttcacgccattctcctgcctcagcctcccgagtagctgggtctacaagcgcccgccaccgcgcccagctaatttttttgtatttttagtagagacggggtttcaccttgttagccaggatggtctcgatctcctgacctcatgatccacccgcctcggcctcccaaagtgctgggattacaggcgtgagccaccgcgcccggcctgacagttaacttttttttacataagtagaaggagtgcactctaaaataatgattaaaaagtatagtatgctggccaggcacagtggctcccaccagtaatcccaacactttgggaggctgaggtgggaggatcgcttgaaccgaggagcttgagaccagcctggacaatgaagtgagacccacttctctacaaaaactaaaataattagttgggtgtggtggcacatacctatagtcacagctactcaggaggctgaggtgggagaatcacttgagcccaggagattgaggctgcaataagctatgattgcaccactgcacaccagcctgaatgacagagtgagaccttgggtccaaaaaaaaaaaaagtaaatacataaaccagtaacatagtcgcttattagcattatcaggtattatgtatggtacataattgtatatgctatgctgttatacgactgcctgcacagtaggtttgtttacagcagcatcaccacagacacatgagaatacatggtgccatgacattatgacagctgccatcatcactaggtgataggaagtttttagccctattattaccttatggtaccaccatcatggttttggcctgtcattgactgaaacgtcattatgcggtgcatgactgtttttgccattgctcgacaggagaggtgaggtttacacaatgcactcttatggacttcaccaaaatttgataaaacattcttacatttttcaagatgtgaaagcatgacagtttgttattgccacagctgtttgtcagtggtagaagtttacagtgggcttactgcagtggtacaaatatgtaaactgctgtgaatataacctttctcttccactcaggaaagcatgttgggagataacagctctcccctctgtttgtgttttaaagctttcctctttaaacaaatggggctgcgacaactgcatagccacatgcaaaagaatgaaattcgacccctgttatatgcagaaattaaaagtggatcaatgacctaaatgtaagagctgaaaccataaaacttttggaagaaaacatagaattaaatcttcatgatcttgaatgtgttaatgattcttagatattataccaaaagtatgtgcaataaataaaaaaataaagtggacttcatctaaattaaaaactttggtgtatcaaaagtatcaagtaagggagaagacagccagtagaatgggagaaatatttgcaagtcatgtatctgataagggtctagtatcagaatatatgaagagctcttataactcaataataaaaagacaaaccacttactttaaaaatgggcaaaggattgagtggacatttctccaaagaagatacacaaatggacaacaaactcatgagaagatagatgttcaatatcattagtcatcagggaaatgcaaacccaaaccacaatgagttaccatatcacatgcactaggatggcattaagaataccaataataaggaaaataacaagtattcgtgaggatgtggagaaattgaaacccccatagtctgcttgtggaaatgtaaaatggttcttctgctgtgcagaacaatttggtggttccttcaaaagataaacacgaattaccatgcgatccagcaaatatgctcctagatctgtaccccccaaatgacaacaagtatacaaatatatgtatacacatgttcatacacactagtcacagtagccagaaagtggaaacaacccatgtgtctatcagtggacaaaaggataaactgtaatatgtacatacagtggaatattattcacccataaagaggaatgaagtactgatataagctataatgtggatgaacttgaaaacatgttcagtgaaataagcaggtgtgtcacatattgtatgattgtatttacatgaagtattcagactaggtaaatttataaagacaaaggacattggtgattgctaaggtttgggaggagggagaatggggaataattgcttaatgggtacagggtttccttttggggtggtgaaaatgttttggaactagacaggtggtagttgtacaacattgtgaatgtacacaatatcactaaattgttcactttgaaatggttaattttatgttatgtggatttcagcccaaaaaaaaggtctacaaaaaataaaataaggctttcacaagctttggtgctttaatgattagtagcaacgggtgcttggtagataccggtatttgaggacatgattattgagagtcactggcgtgcactaccacacctagctaattttttgtatttttagtagagacgggatttcaccatgttggccaggcaggtgtcaaactcctaatctcaggtgatccacccgtctcggcctccccaaatgctgggattacatgcgtgaaccactgtgcccagccaggaatttatttaattgtgacatgtgtattttagtttcttcatcagtaaaactgagatggcaatagtacctgccttgtaagttgttgtgaggattagagatagtggctataaaatgggtggtacaaaaatggatgcactgtaggtgtttaagaaatgatggctctgaccatcaatccatggcagctaaatgctggagcccacaggagaggccaggaggatggcagaagagttctgttctgtggtttccctgtgattaatgcagactctggtttcttctgtattcttttccttgcctagtattgatcctccagaaggtggagaatggagacctgagcaacaagattctgaagatcactgattttggcctggctcgggaatggcaccgaaccaccaagatgagtgcggcagggacgtatgcttggatggcacccgaagtcatccgggcctccatgttttccaaaggcagtgatgtgtggaggtaaggtccaggggggcagggacagcatttcctaggtccatcttggtggcacacacatttcaagacttggagaattgaggttacctaggatcccaggcacctgaagtaggtctaagtgacctcccccaagagtcatctatgccaattcccatattgccaggggacagtttctaatgctttcatctaccaaaaaaatccctgaagtgctatacgcaggccactttttgctggtgattgctccctaggaaaggccagtagattccaggggcaacatgtactcccatctctacgctgtaagatgggaaggacactcggtccttctcggagagcttcgtgaggatcagtctggcttgctcagcaatgctaggctttcgtggctgttactgctgaacttggggaggggattaacccaatgtcctcactctaaagctcctgagccaatgaatgttctttgtgcaatctcgtttttcttgatggcctaaaaattaccttttccagttatctagttcatcttttagtcaaggctctatctgttgacattgatccagaaatcagaaaaaaatgggtcccaaatatgtgcccagaactgcaaagccgcagactagaaatgaccagccatcctcctagtaaatgtgagcccaaaaggttgcaaggaaatagatctaaaatttttcccagctgaggaaggatgagcaactacctagtatatgttgtcatggctgtgggacagtagcatcaccttagtatacaaaagaaaggactgtagtttatcattatatatcagtccatggagttattgtcctgatgtgttgtaaagtgagctgtgtatgtgtgtgtgtgtgtgtgtgtgtgtgtgtgtgcacgtttattttaaataatagctttattgagctattattcacataccgtaaagctaatcctttgtacactttagaatgtataagttggctggatacagtggctcatgcctgtaatcccaggactttgggagggtaaggtggaaagaactctggggcttgggagtttgggaccagcctgggcaacatagcgagacccccatctctacaaaaagtttaaaaagtatccaggtgtggtggcatgcacctgtagtcccagctacgtgggaggctgagatgggaggattacttgagcctgagaggttgaggctacagtgagctgtgattgcaccactgcacttcagcctgggtgacagagagagaccctgtctcaagaagtaaataagcatgtaagtcagtggtttttagtatatttaaaaggtgtgtatgggtcaccattgttattagtttcctagggctgctgtagcaaattactaaacctagtggcttaaagcaacagaagtgcgtgcttttatagttcctgaggccagaagcctgaaagtgatgtgggcagggccacaccctccagagactctagtgaagataatgactcaaataaggattctgggtattgggacatagatatagctttttagggccaccattcagcccattacaaccactatctatttccagaactttatttttatttatttatttttttgagatggagtcttactctgttgcccaggctggagtgcagtggcatgatctcagcccactgccacctctgcctcccgggttcaagtgattctcctgcctcagcctcccaagtagctgggattataggcgtgcaccacacctggctaatttttatatttttagtagagacgggatttcaccatgttgaccaggctggtcttgaactgatccaaagcaatctgcccacctcggcctcttaaggggctgggatcataggcatgaaccacaccatgcccggccaatttccagaacatttttatcatccaaaaaagaagctccatgtctattatcagtccttccctaatccttcccccttctactccctagcaaacactaatttcctttctgtctttatgaatttgcctgttctggatgtttcacataaatggaatcataccatttgtggtcttttgtgactaggcttctttcatttagcataatgttttcaagattcatccatgttgtaatacaaaattagctaggcgtggtggcgcatgcctgtaatcccagctactcgggagactgaggcaggagaatcgcttgaacccaggaggcagaggttgcagtgagccaggattgtgccattgcactccagcctgggaaacgagtgaaactccgtctcaaaaaaaaaaaaaagattcatccatgttgtaacttatctcagaatttcattcctttttaaggcttaataatattccattgtatggatagaccacatttgtttatccatttatcagttgatgggcatttgggttgtttttgctttttggctgttataaataatgctgctatggacacttgtgtacaacacaagcttttgtgtaaacatatttttttcagttttcttgggtctatccctaggagtggaattgctgaatcatgtaacagttctatgtttaactttttgaggaaccaccaaactttttcatcatagctataccattttattatattcccgttagcaatgtatgaatgttccaatttcaccacatcttttcaatacttgttattgcctttttttaaaaaaaaagttattattatgtctatccttgtggatatgaaatagtattttgttgtgattttgatttgcatttcactaaatgacttatgatgttgagtatcttttcatgtaattattggccaattatatctctgaacctgaagaaatatctattcaaatcctttgccaatttaaaaattagagtatttgtctttttattgttgagctgaaagagtcctttctattctctcatcagatatatgattagcaaatttttttttccattctgtagattgtttttccactttcttaaggctgttctttgaaacagtgtttttaattttgatgatgtctagtttattttatcatctgtggattgtgcttttggtgtcatatctaaaaaacattgcctagtccaaagtcatgaagacttacactcctatatttttttctaagagttttataatcttagctcttacttttatgtctctgatccattttgacttaatttttgtatgtggtatgaggtaggggtccaactttattatttttcatgtggctattcagttatcctggccccatttattgaaaagaccattttttcccatcgaattatttggtcacttttatcaaatgtcaatttaccagaaatataaaggtttatttctagattctcagttctactccattaatctatatctgtccttatgccaataccaccctttcttaattagtatgactttgtggtaagttttgaaattaggaaatgtgattccaattttgttcttctctttgaagattgttttggccattctgagtcctttgcatttaatgaatcttagggtaattttgttaatttatacaaaatagatagctgggattttgataggaattgcatcaaatctgtagctttgtagattatttacaccctttttttttttttttttcggacagggtctcaattgcttgagctggagtgcagtggtgtaatcatggcttactacagccttgacctcctgggctcaggtgatcctctttcctcagcctcctaagtggctggagctacaggcatgctccactttttctattttttttgtagagacagggtttcaccatgttgcccaggctagtcttgaactcctgagctcaagctgttcacctgccttggtctcccaaagtgctaggattagagatgtgagccactgcgcctggccctattgacatcttaataagtcttccaattcatgatcatgggatatctttccatttatttagacctcctttaacttctttcagtgatgttttgtagcatctgtatattgaacctcattttaccatgcattaattacagggtaaagtagctaatgagaagaaatgagtttaactttccttaaaatatctgacctgatctcattaagttgagttgtatactgatattcaactatttttgatatataaaatcagcaatttcatgtttcagtttaacacttttattgcttgaccatatgctaatgagattaatacatcaattaagctaagctgctattacaaagaggcatacagatatggaggcttagataggatagaagcatattctctttcaaaaactagctaaatagcccaggctagcagggcaactgtgccccatgagatcgtttaggaacctaggttcttttagattccctcagtgcattgaccttgaccgaatggttaaattgggtgactgttatgtgtgtattacaattttcataaaagaggaaggagaacttactcatggcaagcgcagtttatctttaatttggaaactatccagaagttgtacacatctctgcacacccaattgcctgcacttggttatgtgggcacacctggctccaagggaggcagaaaaatgtacgttctagctggacaactgtgtgccccactatggaagacaggaagggtggatttgaggggacaagcagccacttgtcacactcaactctctcttgccttttttaatggaaaaccatgatttctcagtaacatgattgttttctacctccagtattcccactaggtttcttctcccagcctaaccctgaaattgctcaggttttactgtcacacactccagaggtttctgctggtgacgatttggacagagttgtgtcatgtatccaagtaccttcgtaccttcccagtgggaagggaaagcacaaatgccgcatgtagagtcttctcaggatgacagaaattgtagacagggaaagacaaggccattgcagagcttttttctccaccgaaagaacaagggcaggacctttcaacttttaccctaagtatccttgttgtaagactaacctctaggtcttgccctataaccatgatcctaaaagcaggcttgaaggaagagcctctggtgagaggcatctgatgaaattattctactctctagaggaaatcacttggaggtaaacctcaaatcagaagcactttggatgatgtgtcttggatattgtcacatggtctgccagcaggtctctagttgctctagtctagacttgttcccaggacttaagcctcctgacccagtttggttgatgattgtggtttgaaaacataattcaccctgctccctttcagctgtcttagcttctatgctgcaggatttccttcaaagcacaatttataacccattaaatgggcctttcattccttcttcctcaggcttacccatctaagtagctccaaatggtctctcacctttagcagaggaaaatgtgtgcccactgctgtacatacagcaatgcttgtacactggtaacagttgttaccacctacaaatgcttaagggctagggtctgtggtaaatgttatacatcttctatagtcttcacaagaattccccaaagtagggatcatcatttccattttacagatgaggtaactgggctcagacaattgaagtcacatgcctaagttcacccaggtggcagacataaagctatgattagaactagatatgtgtgtagtgacaatctgtgcttgtagttatgccaccatctgtatggtcctgttcctgcacttaaggcagcctcttctgaatgatcagcccaccgtgcgtgcctagggcccagcagggtgtctcagggagggccagggcatgcctaggaacttggtacaaagctgtttcccaaactgacttgtaactcactgactcattcaagaagtgtctgtggaatgcttgccctatgccaggtactggctgagtctgagtgccccacacctcaaccctcctggaactcatccagagctgggggcctctgcgcctctgctattccaggtgcccagggccatctggtttgtcttcctgctctttgagtgtgcttctaaagttctcctgcaaatgttgtgatggagggtgagatgataaagggctggatcctcaattgtgtaagtttcccagtctgcttggattggggactgcctcaagaaggctattgctgaaattgttccctttctttgcgctgtgtgggtagagcagtggttactgtcagagggcatcgtcccacaaggccttcttgcctgttggttgtgggatgaggtggaggcattgtcttaatcattttaagtttaaaaaattacaatagtggctgggcacggtggcttacacctgtaatctcagcactttgggaggctgaggcgggcagatcacaaggtcaggagatcgagaccatcctggctaacatggtgaaaccccatctctactaaaaatacaaaaaattagccgggcatggtgctgggtgcctgtagtcccagctactcctgaggctgaggcgggagaatggtgtgaacccgggaggtggagcttgcagtgagctgagatcgcaccactgcactccagcctgggcgacagagcaagactctgtctcaaaattacaatagcaaaacgttttctgtagaaaaaatttgaaaatatgggtaaacaagaaagaaaagatagggaaagaaaatcaccctgaacccacttatagagataatgcgtattgatatttgggtgtgtttactcctattcatgtgctcatctgcctatccctagtgggatctttctgttttaaaagttgctttttgaatgtaatatagcatgaacacataaccacattaataaatatgttgttatgtcaataagtttatcaatgtatatattacatatatgttaataaatacatcatcattttgaatgagggttcagttaataagaagaagaattatatgctactttcaatttacaaagtgctttcacatatattagttcaattatctttgtcaaagattattaaacagtcagtgtggttcctggaatgtggaatcatagataattaccaagtgcaagacattccccagcccacctcattcaagggagactggtcacctcctttcagagcatggaccctgacctgacagtctagagatggtgcaggttactacaaaatagagctctggcccagcacaggcatggagttgctgtgccttttgtcaagaaaggtagctgtccacttttcctcactttgaaaaaaaaatcaaacacccctcctccacctctgatcctaggaaatggttgaagggattaccaagcctcgggaggtggttaattattaactcaagagtaaattttgtgagggttgggttaggcagtgaggacttttaggaaattactggcagcactgtgggagctggtgggtctgtgttgcggggaggtactcagaggcagtgacttagctgaacgagttcttccaggctgcttgcaaatggtcatcaaaggacttgttgaccttttaaccttgggagggcaactaagttgactaaacctgaggtaaatcacatcaacttctactgcccgcctttccctgagctcagatccacgtaaacttgtatttctcttgaatttctccagtcttttttcccaccaacagaataccaagtcttcatttatatcacccaccttccattgtaaacataaagcgggatgttggcagaggaaaactagtttagtcagccccagaaagacttcttctctgaatgccagtgtccctcagcaaagctctcaccaacactgtagctctacataagcctcctcagacacaatctcatttcaggcccttttggagaaaccacaggtctactagccatagatggtaatttctggatgagggttagttgttggtgttagtgattccttgtaactcttctgtaaggtcggtattgctgtctttgctgtagggatgaggaaactgaggtttggagaggtgaacttgcttcctaaaggcacatagctgttaagtgataaaacaggcatttgacccaagtctgtctaaatctttctctggtagcattctgcctacttgggcagtagttctcacattccttttagctgtagaacccctgaagtgggatagaatgcagacaaacaaagaaacaagccaggtaagagcagagctgccctgactggagctaatggggccagtcccagtcccataaccccccacccctgcctcacccccgacatgcttccaggcggtctgagacaccttcacaggacactgagagcttagtgtgaaaactgtcacagaagggatgcagggacacaaacagaacatatttggatctttgaaacactctatgatctttccaggtagttagggcccagataccgtctgtctttgtctggttgggagaaaggggttctgtgggacctttggtttttattctccaggatggaggtgggcatttattccaagagcaagcaatggaggataacagtggctttgacctaggaatctggttggcaatgctgagagttcctggaggtcacttggtagaagctccccagcatgaccactacctggataagtcacatgaaaggtttgtcaggaagtgtaatagtgcaattcttgatgatgtttgggttttcctctagaggacccagggcagcctgcaggactgtctgaccatgcgctcactcccatacccacagacccactcactcacatatctatgagtgcttcctgtgtaccagagcttgggctaggtcctgagaatgcaaagattaaaaacatttctccctgctctttaggagcctataggctagcagacaaacagctacaatacatggcagcccaaatgggctgagtaacatctggggatgtcaagaaggcatcgtaaagtatccaatgctattcccataagcctccaaactaaaatccatctcctgtctagacgagtcaagaccaactggctaccaggctttttgttttttcctggcaagatgcataaagaaaatgatagtatttgaaggcctcactggggtaaagccgtcatctgatgaatgaataaatggtgggacatttgagttggatcttgaaagatgattagcatttaccaagcaaagaaatggtagaaggcattctagggggaataaattgagaactggtctgggcccaccatgatgtactctgtgtatgcccttagtaatatgctcctaaacatgtctaaaacttgctttccttgtgtgcaaaatgttgataatacctatcagaattgttgtagagattcacagtgatgtttgtaaagtgtcttagtggtcttcatatataaggtttcatgataaatagctactgggtttattattattattgattactttgagacagagtcttgctctgtcacccaggctagagtgcagtggcgtgatcttggcttactgcaaccttcgcctcctagattcaagtgatcatcctgcctcagcctcccaagtagctgggattacaggcatgcaccaccacacctggctaatttttgtatttttagtagagatggagttccaccatgttggccaggctggtcttgaactcctgacctcaagtgatctgcctgcttccgcctcccaaaggctgaatttacagtctgggattacagatgtgagccaccatgcctggcctattattattttttaaattaatatgacctttgttgctggttgcaaaacttattgttgaatttggtgttgaaaacataaggagagccattcttctaactattcatagccttatggtttcttgtcctgacttattcctggaaggactgagtgctgtgtgattgtgtctggttctgatcgtgaattcacagaataattcttccattaagctttgtactccacattcactgactcacaggacacgagaaaagaaattctttatgtggacttgaaagatagggagggcacactgaagttctcacagctgatgcgctgctctgttctaccgatgtggtctacccttgtgaaacttttccatttgaattagagatctccgttaagaacccactcacgctgatctgggggcagaaatctattcaacctagtgggcatttaaagaaatcttttataggaacaaaatctgctttgagtggttagcactctgctttttgtaaagctaaaaagaaaatctgttaatcctagcactttgggggaaaaaatgtatctgtgacaaaagctgaagttttcttaaaacagaaaaaaaattatacttgggaggctgcctcttctcccagtttatttcattaataataatgataacaggccaggtgtggtggctcacgcctataatctcagcactttgagaggccgaggcgggaggatcacaggaggtcaggagtttgagagaccagcctggccagtgtggtgaaaccctgtctctactaaaaatacaaaaattagccgggcgtggtggtgcatgcctgtaatcccagctactcggcaggtggaggcaggagaatctcttgaacccaggagatggaggttgcagtgagccgagatcacgccactgcactccagcctgagcaaccgagcgaaactccatcccaaaacaaacaaacaaacaaacaaaaaacaataatgatagtgaaagagctatggccattgggcacttatttaaacactatagtagctcatttaattcaacaatagccttgccagactgatagtgttattcgtgcattacagatgaggaattagaggcttaaagaggtgtagtgccttgcccaaggtcatatagctaaggaattatgggagaaaacttgaaaaccaagtatgcttgactccagagattttgcttttagctagtaggctttatggtttcccttttatatcacattagtatttctgtttcattagtctcactatctgttggggagaatgtgggatgctcagaaaagactcgagctattgcagtgaagttgtacctgaagtttattacatggcttctgtcttcttcctctccttagctatggggtgctactttgggagttgctgactggtgaggtgccctttcgaggcattgatggcttagcagtcgcttatggagtggccatgaacaaactcgcccttcctattccttctacgtgcccagaaccttttgccaaactcatggaaggtaagtaagccctggcctgaaccaaactggagacactttgcctcttgtaagcactgggtagagtttggccaattctgtgagatcagttactgaaagaggagataaagtttcagtcacctaaggaggaatcctctgggcaactggaaaggcttcttcaagatgacatccacaccctgctgcaagcagtcatatctccagggactgtagaagtgaaattagtaacaaaagcctgctatccggcacttcagcatattatcatttaatgcaaaatcagaaagtacagcaacttttatgtcaggacctctgaataccttaagagacgtgaagaacatcttaggagaaagaactctaaaagtcatctagtcaaaccccataattttgtaagtaaggaatctaaagctaagcgaagttgagtggataggtggccacctcattagagagtggctgagctgggattaggtagaattcgatttccctgactcccactagaatgcttttcatcctcgcctcctcatcatcccattgtgggtgggggaaggctaattcatttatttatgggaaactgaagcccagggcataattccccattgtctgttcttgaatcaggtagtaacatggtaaattgtgttgtggtggtgctttgtacaagaaaactctttgggctcgcttttcttatccttaattaacagccagaatggaatgagtacagaactgctgcatttcatttccattttcactctttatggttgtaatggtggacagtttgctttacttcctgagccttatttgaggttacctaaattctgatctctgtttctggaagaagtaagaggtagttttctgggaagtgaggccatgtaatagcctaagtcttacatgtttgcttctgtccattcatgctttctgagtattcacatgttctattcagactgctggaatcctgatccccactcacgaccatctttcacgaatatcctggaccagctaaccaccatagaggagtctggtttctttgaaatgcccaaggactccttccactgcctgcaggacaactggaaacacgagattcaggagatgtttgaccaactcagggccaaagaaaaggtaaacaaaacaaaaaaaacaacaaaaaaacgaacgaaaagaaaaaaggcatgcattgaattggtagacctcactcacagggacctctggaccgagtctgactgaccatcttgattctagcatgcccaccttccagcttggtatctacttaattgtccaaaccagagaagaatgcagttgggcaaaatcccagtgcttggattacaggccttttttcttttctcacagtggaatgtctcaccctgccagctggaaatatgagaagttctggaaatgtttcttgattctacaatagacttctagaagaaggttaatttgatatagggatacttcaaccttgaggatagttatcagaacatccttcccatgtcttttgacatcagaatcagaaatagaatatgggcaaaaaataacatgggtctgaaattgtgtggcatttttcatgtttttatgaaaagtatttcaagcccaaaccaaccagggagttcagagactcctagcctaccagagatctgcttttttgttttggtggccattccctaaatggcccctttctgttccctcagtgtgtccctagcagtcagtgtacacacaggtgaagccagtcacatgcaactatattgcttatataggggcaggactaaatctaagggatgtagctaggggcaagagagaagtctttatagatttggttaatttcttttaccattttttttttttttttgagacagtctcgctctgtcgcccaggctgaagtgcagtggcacgatctcagctcactgcaggctctgcctctgggttcacgccattctcctgcctcagcctcccgagtagctgggactacaggcgcccgccacctcgcccggctaatttcttgtatttttagttgagatggggtttcaccgtgttagccagaatgctctcgatctcctgacctcgtgatccgcccacctcggcctcccaaagggctgggattacaggccttttttcttttctcactctgcactatgggaatttgggaagttaatagccatgtgataataatgatagctaaaattgtttatggctttatggtttcccactttttccacttgaaaaatttgatgagacctttttgtctgttttatccaggagtcctatggctcctgccatcagtatgtaggccaggtgttattattgtttccatctcagagctgagggtcagcaacttgcctgaagtaacagagttagtaagtggggaagcagaatcttgaatgtgggtcttctgattccaaaaaccgatattcgttgtaatattatattagtctattctcatgctgctaataaagacatacccaacactggttaatttataaaggaaaaaggtttaatcaactcacagttgcacagggctggagaggcctcaggaaacttataatcatggtagcaaacaggtccttcttcacatggtggcaggaagaagaaataagtgcccagcaaagggagaagccccttgtaaaaccatcagatctcgtgagaactaactcactattacgagaacaggatgagggaaccacccccatgattcaattatctccacttggtccctcccatgacccatggggattatggaaactacaattcaagatgagatttaggtgaagatacagtcaaaccatatcaagtgtcatttttattctacacaaatgacttacaaataatttctggagctgatttgaagaattaaactctttttatggaacatagcaattctgaacacagtactgtttgccaagtcaatgagcattctctagaagaatggagtgagcttacaatgactctttagggtccctggtgggtggacttgcactggctgttgagcagaatgattacaaaagactgttcctctcactaaatagtattccagctagaagaatcccaagagttgctggccttttgtttttttgattgctgcatcactgacccttggttacctttcttttaattgatgaaattataagggtaccagccagtaagaaaaatgaagtttggattttgtcagtaagtagttactaggaagtcaaactcataatagctaacatttgtagagcatgtgctatgtgccatgctttcttatactttctatgaattatcttatttaatgagataataattgtctgtgtcaatgatgtcagtgctattaactccatattacatgtgatgcccttattaacttgtccaagaccacacagttaatgatggtgaagctgggacctgaacaggcagtttgttccagagtcctttctcttagccaccatgctatgatgcctccctgttataaggcttgttgtttggtaagtgagagtaagatgtgctttctctctggagagattcttcttaactcattctgtatgtggaagatgtgatttgcaaactgtgcaacacaaataggtgttgcaaaagtaggagattcaacatgtctaagggtcctccaggtgaatggtgtcataggcatatattccacaagtttcctcatttaccctatgattcagctaattcctcaggttggatcaacctactgtttctaagtattattgtgagaatgcattggtgtcatctggggtttgtgttccattaaagagagtgacttagagccagaccatcccttagacaagagcatggaggagacgagggcttaggaagcttgaaattagctttgatttttaaacttttacacttaacagcaaaatcaaccaaccaggaatattttttctgcatcttccatgaatttttcttctcttggtaatgaaaacaaagtcataggacagagaaacaaaggatttggagggcgcacaacaattaatttgaggtttatttcatcaaggaagaagtagttcaagttcaactctcaggaacttgtgataaatctatgttcccataaagaaggattgcattcacaatattgcactctatctcctattattatttctcttcattcatttattgactcaatagttattcaaccactgagtacctaggcctaccacatgctagacacttttcaatgtgctaattcttttctcatttcttttctatcactttttttttttttgagacagagtcttgctctgtcacctaggccggagtgcagtggcatgatctcggctcactgcaacctccacctcccgggttcaagcaattctcctgcctcagcctcccaagtagctgggattacaggtgcacgtcaacatgcccagctgattcttatgtttttagtagagacagggtttcactatcatggccaggctggtctcaaattcccaatctcaggtgatccgcctgcctcggactcccaaagtgctgggattacaggcgtgagacaccatgccggccttctttctatcacttttatggctattttgacattctcctggggatggaagacaagctgaatggagagtttatagcatcagaatattgtattcatttcttgatctctttcctctcttccacttttacctgctgctcagcttccccaatatgggttcacatgcttgttttctagctccaggttccctttctacactattttgttttaatccagaatggttacttatagtgagtatttcattaagaagttaggtttcgaccacagaagtgtagctgtggctcctttactgaagaaatatcctgctttttcagacatggctctctccaggttccaccccacaccccactttaatccaaggcccagggtaaccagcattaagagtttaaaatctagatttaaaaattttgtaggcatgctttgttttctttcctgtttcctgattctatatcccctcccctcttgccaggaattcagtgctgggctcacttgtgaactcatgcgtaaggataaaggggaggtagggaagaggttctgccatctgatgtggctcctgcttccattctcagagcaggacaaaagggcctgttcttgggtcacaagatgcaattccaaatgggactttgtcccagttccaccctctagctttctggcttcagctctccccctagcagtgtgactgactgtccttcagatttgcaggggcacggtctgctctggggtgacatctcctgtgctcattgagcagtttgtttcaggggagtgtgatagagcagcagccaaatttggttctagagcaagtgcctgaaaaagacctcaggaaatgttctcttttttccttgctatgcttttgtgattcttctagagcaaatcattgtcctttaagataaggtgagagttgaaaccacatacctcagtggattcattcctcaagtgaccatgaagatttagatgacatgcctcacttagcttttgagcagccaccctggaaacatatttatattttattgttagatgttacctggaggatgatttatgtacagtggatacattttaagctggattaagttggctctgctttaaaaatatctttttttttatttttactatttatttatttttaattatactcttaagttctggggtacatatgcagaatgtgcagttttgttacatacacgtgccatggtggttagctgcacccatcaacctgtcacctacattaggtatttttcctaatgctctccctcccctagccccccactcccacagggtgtgtgacgttcccctccctgtgtccatgcgttctcattgttcaactcccacttagagtgagaacatgaggtgtttggttttctgttcttgtgttagtttactgagaatgatggtctccagcttcatccacgtccctgcaaagacacgaactcatccttttttatggctgcatagtatcatggtatatatgtgccacattttctttatccagtctatcactgatggacatttgggttggttccaagtctttgctattgtgaatagtgccgcaataaacatacgtgtgcatgtgtctttatagtagaatgatttataatcctttgggtatatacccagtaatgggattgctgggtcaaatggtatttctagttctagatccttgaggagttgccacactgtcttccacaatggttgaactaatttacactcccaccaacagtgtaaaagcattcctgtttctccacatcctctccagcatctttgttttctgactttttactgatcaccattctaactagtgtgagatggtatctcactgtggttttgatttgcaattctgtagtgaccagtgttgatgagctttctttcatatgtttgttggctgcataaatgtcttcttttgagaagtgtctgttcatatccttcacccactttttgatggggtttttttttttcttgtaaatttgtttaagttctttgtagattctggatattagccctttgtcagatggatagattgcaaagttttctcccattctgtaggttgcctattcactctgatgatagtttcttttgctgtgcagaagctctttagtttaattagatcccatttgttaattttggcttttgttgccattgcatttggtgaaaaaacatcttttatataatagaaaaaatttggcttgtcgcagtgactcacgcctgttatcctagcactttgagaggctgaggccgatggatcacttgatgccaggagtttgagaccagcctggccaacatggtaaaacctaatctctactaaaatacaaaaaaattagctaggtttggtggcacatgcctataatctcagctactccggtggctgagacatgaaaatcacttgaatcagggatgcagaggttgcagtgggctgagatcgcaccgctgcactccaacgtgggtgacagaatgagttgctgtctcaaaaaatagaaagtaaagtacaaccaagtctgtaaataaatacatgattatattttctattcaaacctatatatatatatatatatatatataaatatatataaatcacaggcaattttaatgaagaaggaaggagcgactagaaactcttagcccccatttctagggcttgacctatggctttatcttctctgactgtcccgtcagtatggctgttctgagccttcctttccccaccattcaaggtggtctaatgttcatttaccagctatcgagtcctctctcttcactgagcatcataggagagctctccaggtcaccataagccctctgggagctctcaggcctcaccccagagcccctctgcactgagcaccccagtcttttctctgatggttctgcccatcctgcaggaacttcgcacctgggaggaggagctgacgcgggctgcactgcagcagaagaaccaggaggaactgctgcggcgtcgggagcaggagctggccgagcgggagattgacatcctggaacgggagctcaacatcatcatccaccagctgtgccaggagaagccccgggtgaagaaacgcaagggcaagttcaggaagagccggctgaagctcaaggatggcaaccgcatcagcctcccttctggtcagtggccggggactggctgggaagtgggagcagggcaaagaactcgtgtggcagagggtttgagggagtccgggactgagcttggaaacatgacaccctggggctcaaactccagcctgttttaaatgggccattctgttcactggaaagactggcatgttgaaaatctaccctactccagggaaattgttgcatgtgagtgaacacagaatatgaagtgaggacaacccggcaaggtccaggctgctagaagcctggtggctcacaggggcacatctcactttaggcaaacctggagaaggaagcatgaagttgggggaaaacattccagggtgtgcatgtgtgagacacgagaagttttggctctgcaaaataacttgtctcaaggtttcttttttttgagacagagttttgcttttgttgcccaggctggagtgcaatgacaagatcttggctcactgcaacctccacctccccggttcaagtgattctgctgccccaggcccccgagcagctgggattacaggcgcatgccaccacgcccagctgatttttgtatttttagtagagacagggtttcaccctcaagtgatccacccaccttggcctcccaaagtgctgggattacagttgtgagccaccactcctggctgacgtttttttaattagtcccctgagtgcagttgagactgggtttaatgtatgagaatttacatgataagatttacatgtgacctttcagacacacacatcagttgaataaacatgcatttgttgtactgcagccttggggaaaatataaagaaatatgaaactattaattagaatctttgtggtgtgtaatatatccatggagggagccgaatgctaaaatgtgtgttgatgtagataaagatattcactgtgttctaagtctatgaggccctagaaagcaggcttattagaagtgtaaggaacaggccaggtgcaatggctcatgcctataatcccagcactttgggaggccgaggcgggtggatcatctgaggtcaggagttcgagaccagcctgaccaacatgcagataccccgtctctattaaaaatacaaaattagccgggcatggtggtacatgcctgtaatcccagctactcaagaggctgaggcaggagaattgcttgaacctgggaggcggaggttgcagtaagcggagattgcgcccttgtactccagcctaggcaacaagagtgaaactccatctcaaaaaaaaaaagtgtaaggaacaaagaaagaatggtctaatggggcaggagtagatgatgttaagcactaaaatggtggcttaattaagtacagataagggaactcattccatgcagttgagtgaatatgtttatgagccgtgtttgctggtccccttgctgcacatttgtttttccttttcagacagcatggactctttaagcaccctttgagcatctagcatgtgtcagcatattgttgcatgtcaggatgcagatagaaaagctatagttcccacctgcagggagatcacagtctaatggggagacataggtgcaagcagcagctgtttattttacctctttgatagatgaggagactgaaactcagaaattcagacctgtaagttttacattctttatgctgtactgtaacttcctttggaatgtgtccgaattggagccatttgctccatctccctcactgccctaggttcccacaagggctagtcattgataccctgctgtgcctgcacttagtgagaagaatcagtgtccctgcttcagtccctgagaaaagaggaccaaatctatctgataatagattatgtgaaaccaataattttaagttaaatttcctagaataatcaacaacatctcatgagctaaacagctattcttaatacataactgcttgaactatattcattatatagacagctttatgaagctcacagatgaagttcacttgcacagtgaattttccatctttttatacgttcatctccccatgtcccttgggaaaaagagatgattctaaaagagaacatttcccaggtgaacaaagagcttttcaggaaactggggcctgtccctcaaggatgctgaggaatgtcatatttcttatatgaatttaattatgggaaatgttaatgcatacacgtgtttgtctttccccaagcagatttccagcacaagttcacggtgcaggcctcccctaccatggataaaaggaagagtcttatcaacagccgctccagtcctcctgcaagccccaccatcattcctcgccttcgagccatccagtgtgagactgtttcccaaattagctggggccagaacacacaggggcacctgtcccctgctctgtccagccaccgactggtccaggcttgctccatccataacttctgccacctctcctcgacaatgtgtatatacatgcacatatgtacgcaaacccttagccctctcccttgtctctctccattaactttactactgccccctctaccttttagtcacatatcagcaaagggatttgtgggtactaatgggatctttagtggtttgcaaagcaatttagaaactggtgtgtgatgtggatacaggttgctacctggcctgagaacctaacacactctttgccatatttggggcatcattgtttttctttagtccacacttcccaaggaagggtttttttttcaaagtataggtcctaaggaaacttgccatatactttataataagccaaatctggaccaattttatctttgctacagtatttgcttaaaaaaaatactcacacatacatgtaagtgtgtgtgtgtgtgtgtgtgtgtgaacatacacctatatgtgaatgaattagtttccctggtttaaagacagattttatttaaaaatccaagatttcggctgggcatggtggcttatgcctgtaatcccagcactctgggaggctgaggcgggcagatcatgaggtcaggagatcgagaccatcctggccaacatgctgaaaccccgcctctactaaaaatacaaaaaagttagctgggcatggtggcacccatctgtagtccgagctacttgggagactgaggcaagagaatcgcttgaatgcaggaggcggaggttgcagtgagccaagattgcgccactgcgttccagcatgggcgacagagtgagactccgtctcaaaaaagaaaaatccaagatttctagctttccttgaaaaatgaaatcaaatcagtaggtttcttttttcatgtggctacagttggctggcactaatagcagcttccgtatactccatattttgcctcagccccttcaactccttgttttttggtaactagtttgctcgtttatgatataagcacagtccctggggcatttgggtctcaacccttgctccaaggtattaatgtcagaaaaatattcctcctctcttatctgtctttctctaggcctctttcttccccttctcccactccagacttccttttccataaccttgaactcctcattttcttcccaaccctttctttccaagattcctgcatttccacgccttccttaccccttgtcttttttccccccttacctgcctccttatttgctcactacccaatcccacccaacaaaacaggtaaagtcagatctgtttggaactctgatgtctggctggcctaagctctagctttacattggatttgtgaaaattgaagaagtgtttccatgtttagtactttgagagagctaaatgattggtggctgagaactccattactttcctggaagggtccacttgggcacagagtttttgataaggtctaacttccctgcagctccaaatgtgtgtgtgtgtgtggtggtatagaggctagtttgggggagccctgtctgtccattttctagatcctatccaacccttgtgattcacagtgacaccaggtgaaagcagcaaaacctggggcaggagctcagtcgtcccaaaggaggaaggggaggaggaggagaagagggccccaaagaagaagggacggacgtgggggccagggacgcttggtcagaaggagcttgcctcgggagatgaagggtaagtgccagatgacatgaaattctttctctcttgaagatggatgtaccatttaaacataggatatgaaataactttttttctctgtcgtgtgtttgattgctttctgagaaattacaagcttcttgatctttacaacagtttttcaccctccaagttcctggaacgtcctagaacaggcatggaaaactttttccataaagagccagataatacatattttaggccttgtgattcctatggccctgtcacaactcttgagcgccactgttggaacacagaagcctccagagaccatggacaacatgtaaatgagcgagtgtggctatgttccagtaaaaccttataaaagcaagtggcgggcagggtttaacccaccagttatagtttgccaacccctgaaggcgttctactcagagtagcaagtagcccaagcagtaaccaaatgtaaaaagttctgccagggtgttctgcttatacctggctcttcttccatttttaaagcagaggaaagagaagaaagagcagaagttaacaggactctcttgcctagaggctcatgctgaagcaggggcaggcagaataacccagccctggtagtacagttgtatacaactccagggccgctagaactattttcagatctcaccccatagccacactgccatgtatgatggctcctctgggcagggcacaagaggggtgagagcctggagtgtgcttgtgttctcactcgtgggcttgagtcctgggggtcaaattctcccctgagtctgggttcttcacaggcaaggcactcatagtgtagtaatgaagatctttgactctggcaccaaactgcctgggcatgaaccctggcaccaccacacctagctgtgtgacgttatgttttctcatttataaatggcataacattagtacccatctcatggagttgaggcaaggaccaaataagttcatctttgtgagtgcagagaggatgagctggcccatagtgagcgtatgtaaatattagctgtgatgacacttcctgcttctcatgcaattttacatcatatctgaagaatggacggaaccgtttatacttcatattcttggtgttagaagctagcacagtgtttcttgatgtttctattaaataagtgcgaggatagccagcagtctccttccacattttttagtgactttctaaagagcttctcaggttgaatattaggcttacaagtgccctgaacctgcaagtggccttggtaatcctttaaacactaagattccatgtccaaaatctatgattttcccatgtcagatctgagccgaaggtaaaaataacagtttgattcataaaggattgactctctgaagctaggctttgtaaatcactagatacctttgagcagaaagtttagatatgtagggcaaactacctcagctatgtaagaatccagcgatggaatccttgggggatggcagattcttctactaagttttgtaggagcaagagctctccagtttgtcccttgagctctgggctagagtagggttgagctgggtctgagaaactcagtcaccctgagtctcttgatttaaatattttttttcttttggtcttggtagtaaattaactttatttcacattgcaaaatattaacttcggaattttcttcttcctcacaaacttttgaaggaattaaaaaatatatgacttaattttttcatgagtcttagttcctattgaagaaataaaagtatattctatccagacttgagtgaagacccctttaatgtcagaaattttgagaacttctatgtgatattatttctggttttagtaccttttgactaaagaaaacacgtgatgaacaaaagccattttgaattcagtaatgttaagtgagttttgcatcctcatccttttaaaaaataatacatatttgtccaaaacatgcatacctgtctatagactgcttgggtatctatggattcacagtccccctgcaaccgtgctgcagctgcccagggatctttgtcctgggcctgtcttggcttaaacaggaccatcttgttaagattctttcatggtgtgggctttgtgtctggacagtgggaaggcagctggcgatgtggtgtgaatccagccttgggtgttttggtgtgggagaggctgagctggatgtgccctccattgcctgctactgattctctttattcattgaagatcccctcagagacgtgagaaagctaatggtttaagtaccccatcagaatctccacatttccacttggggtgagtctcatcttcaccctttcaccagctgtcctggtaacaatctcccttccatttccttgttcttacagcataccccatagaatcaagcctcgttattgccagggctgaactgacttttttgtttttgtttttgttttaagcagtaccattgtgcaccttgggaaaattcctgtgttgatctaattttaccatattcttcactccactgaccactccaattaggatactcctggcactcttggttttagagaggcttagatatgtggctatttatcctttggtcttcagcactggttttgactttactaatctggattttcctggatccagagctggaagtgatgttacgagagtctcagtaggaagccccaggctgtgggtttggcagcaggcttatctctgactatattttggttgaaaccagtggtggttgggatgtactttaatttgctggtatttctgatagcacttgaaacagaattctgaacagcgaaaaagttggtcctctgtctctctcaagatggctgggactttggggaaagtggtctttagttgaatgattcttcctagacttaaaaaaaaaaaaaaaaagagccactctggtcataatcccaatatttccagggcaaccatagcccacagattcctcagtcctcccttttactgtcctctagggaaaagaccagtgcttctaggcctctggttcccccctcctacaaagtggttggcagggtgcccaggctgtatcctcggagagttaccggctttccatatgggctgatgacagggatttgaaagcgagctcctgtcctctgtctctccacccccagacagaccaagggctctgcttcagcactgtgcactacccacgtaggtctgtcccacagtgcactgggttggtgcagctttgtgggttggttttgccttttaaaaaggggatggctttgaaagttgcctaagcatgccataaagcttggaaggaaagcctgagaaatgccttatgtggagtagcctggtccacctctgctagctcggctgcccggtgcttgcctggcttcgcaggtctttgcatcaccgtaactgtcatgccatgaatgtgttgtgtccagtgtctgcttcgagtgcttctctcttgagatgggctcaggcaagacccccagccagcagggccatccttattctttctgtctgcttgccagcttgcccactagttctttctacagttccacagcagcatgtgagggggatgggtcatgtcattgcccttttcttccctggagcatgtgcatttctgtttgtgaagcaggtgggcttggtaagagtcattgcctgtatgtactccaaggttctttggtagaatgaagcaggcagggagaaacgtctccatagacccatggagctgagggtcaagtaagaaaggtaaccagttctgacagtttcctcttttcctctgattcagcctcaagtccctggtagatggatataagcagtggtcgtccagtgcccccaacctggtgaagggcccaaggagtagcccggccctgccagggttcaccagccttatggagatgggtaagcatagctcctcttgagagtcttggctgtctccctgctccctgggggcattcttgcccaagcttctaggaccatttaaggacccctagcactgcttcatggaggaaacattgggaatgtttttgttctagaatgttcagtgttctagaaactcatactacacttgtattaaggggccggtattagtcagggttctccagagggagagaaccaatagcaaccaaaaggaagtttattagggagaattgtctcacacagttacaaaggcaaagtcccatgacaggccgtctgcaagctggagaatgagaaaagcctgtagtatggctcccagggaagacagtagagtggctcaatcccagtttgaaagccttaacaccagggaaaccagcagtgcagctcccagtctgaggcctgagagcctccgaaaggcctcagttacaagtctgagagtccaaaggctgaagaacctggactctgatttccaagggcaagaggagaaaaagtgtccctctccagaagggagaaacagagagaggaagctcagcaaactgagcatccccctttttctgcctgctttgttctagccttgctggcagccagttgggtggtgcccatcgacattgaaggtgggtcttcctctccctgccccctgactcccatcttagtctcccctggaaacagcctcacagacacacccagcaactgtgcttcaccagccatgcaggcatccctcagtccagtcaagtggatacccaagtcactatcacagatcccttatgaaagaaatggcaaattagcggatcttttattctgctctaaggaaatgggctctggaatggagagtggtttccctgtgttggggggtggataaagcccccttggttcagtgttcaattccatgtcctgctcatcacaccattgaacctttgtgtccctgagactgagacaggaggcctggggtgaggggaaagggccagattcttattcctgccacctcatttccatttcctgtttctcttccactcttgtcatcttcacagaggatgaggacagtgaaggcccagggagtggagagagtcgcctacagcattcacccagccagtcctacctctgtatcccattccctcgtggagaggatggcgatggcccctccagtgatggaatccatgaggagcccaccccagtcaactcggccacgagtacccctcagctgacgccaaccaacagcctcaagcggggcggtgcccaccaccgccgctgcgaggtggctctgctcggctgtggggctgttctggcagccacaggcctagggtttgacttgctggaagctggcaagtgccagctgcttcccctggaggagcctgagccaccagcccgggaggagaagaaaagacgggagggtctttttcagaggtccagccgtcctcgtcggagcaccagccccccatcccgaaagcttttcaagaaggaggagcccatgctgttgctaggagacccctctgcctccctgacgctgctctccctctcctccatctccgagtgcaactccacacgctccctgctgcgctccgacagcgatgaaattgtcgtgtatgagatgccagtcagcccagtcgaggcccctcccctgagtccatgtacccacaaccccctggtcaatgtccgagtagagcgcttcaaacgagatcctaaccaatctctgactcccacccatgtcaccctcaccaccccctcgcagcccagcagtcaccggcggactccttctgatggggcccttaagccagagactctcctagccagcaggagcccctccagcaatgggttgagccccagtcctggagcaggtgagtcttcttcctcttttctctttcctttctttgtgcctcctcagggagtgaagatgtttgcaggcctcattttctctttccacttcgggatttgagtgaacaccattcctcctcttagccaatcaagaaatacagatctgggatcagggaggcagccagggctggctgacttttctctgacctgtgcctcaggggtcttccctgaggattgaaagaagacaggcaggttctaggaagaatcagaagacctgggactcctttggaatgtccagaccctgagtcttagggtagggtagtgttttcagggcacaggaagggcaggagtctagcttctagttattccctgaggaggatgatgcattttccaggaaggaatcttgcactgcatgtgggagcagtattttctgccacatagctgggattttgcctctcattatagcattagttcacacacactcagaaggcaggcttccacccattcatcacactcttcaacactcacccctgactcatacctgcctcttcaggcgtggagatgagtccaggcaaattgctatccccgtgcatatgactgccctcgacatctgacacctggggacacacactctttcctgtcaccatctctttcctgtcaccatctctttctccctggaagacctaagtctgacttggaaacagcctctaatccagtaggaaaagggggcatagtaataccctttcaatgagatttaagtgtcaacaacagttgtatttaactgtttggcttgacctgccctcctgttttttgttatactcagatatgtgacctctttgggaacagaaaccctacattactcacctttggacttctgatacctagctctgttcccgtcacatgtttattacatggatgagcagtaaatgaacagacatgcccttgagtcaggaggcagcaagcttttttggtgaagggccagatagtaaatattttaggctttgtaggccgtacagtttctgttgtaactaaactacgctgccgtagtgggaaagcagacactggatgtggctgtgtttcaataaaatgttattgtatacctttttttcttttttttgagacaaagtttctgtcacccaggctggagtgcagtggtgtgatcacagctcactgcagcctcaacctcctgggctcaagtgatcctcttgcctcagcctcccaagtagctgggactacaggcatggaccatcatgcctggctaattttgcaaaaaaattttgtagagatggggtttcatcatgttgcccaagctgttcttgaactcctggggttaagtgatcctcctgccttggcctcccaaagtgctgggattataggcatgagccactgtactccacctaaaaccttgtttataaacacaggtggccagcttgtgtgtcatttgccaacatctgccttcagttatttcattacatgtgacccccaaatgtcctattattcttatcagatacagggatcatggcattctaggtcactactgtatccccagtgcctcccagtaggtgctccacaaacatttggtgattcatgttctcctgattgcgtagggatatggtggtgttgggggggagtagcggatatctaaccccgaaatatggtgcctcatctgatgcttctccttttgtctttttgaccaggaatgttgaaaacccccagtcccagccgagacccaggtgaattcccccgtctccctgaccccaatgtggtcttccccccaaccccaaggcgctggaacactcagcaggactctaccttggagagacccaagactctggagtttctgcctcggccgcgtccttctgccaaccggcaacggctggacccttggtggtttgtgtcccccagccatgcccgcagcacctccccagccaacagctccagcacagagacgcccagcaacctggactcctgctttgctagcagtagcagcactgtagaggagcggcctggacttccagccctgctcccgttccaggcagggccgctgcccccgactgagcggacgctcctggacctggatgcagaggggcagagtcaggacagcaccgtgccgctgtgcagagcggaactgaacacacacaggcctgccccttatgagatccagcaggagttctggtcttagcacgaaaaggattggggcgggcaagggggacagccagcggagatgaggggagctggcgggcacagccctttctcagggttggaccccctgagatccagccctacttcttgcactgataatgcactttgaagatggaagggatggaaacagggccacttcagagggtctcctgccctgcagggcctttctacccgtgtccactggaggggctgtggccatcagctctggctgtgtaggggaggaaggggtgcatgcatgtcccccaccctccacagtcttccttgcctttagagtgaccctgcagagtcactcagccaaatctgtctgctgctccctctcctcagccagttgggtgtgcgcagagctgtcatagggtccctttgtcagccccgagttcagcttcccaaacaccagtgttggatattctgtgattgattttggtcctcctccgctgtcccccaacacccaggaatgggaatctggcttggttcgagataggagcttttctgtgtcctaagccctttcatgctagcaggaagactgaaagcaaggtggcccagtgtggggtcatagggcttgatagacctggcactgcctatctgcacttccaggtgccccacctatttatctgagcccacaggtggaaaggggaactgcctcagtgagaacggggggacggggatgttaggaaaaatacagtaaagttgcaatgaagaggttcatgaagtatgtccttgttctttttggaaactctcggcaaagggcaaaccagcaagtattgagggtacccatctagctacttggggtcaggacctcgtcagaccaggtt

SEQ ID NO: 2 - protein, 394 aa, Homo sapiens [sequence omitted]

SEQ ID NO: 3 - DNA, 22 bp, Homo sapiens
catgggtaagagaaagggaaca

SEQ ID NO: 4 - DNA, 20 bp, Homo sapiens
agctcccagcatagttccag

SEQ ID NO: 5 - DNA, 20 bp, Homo sapiens
ggcaacgttgacttccagta

SEQ ID NO: 6 - DNA, 19 bp, Homo sapiens
cagcccagagttcaagacg

SEQ ID NO: 7 - DNA, 20 bp, Homo sapiens
agattttggatgtatcaggc

SEQ ID NO: 8 - DNA, 20 bp, Homo sapiens
cagaagcaataggatggatg

SEQ ID NO: 9 - DNA, 20 bp, Homo sapiens
gtgtcagcaactgcacgatt

SEQ ID NO: 10 - DNA, 20 bp, Homo sapiens
ggcatggtggtacatgtctg

SEQ ID NO: 11 - DNA, 21 bp, Homo sapiens
aaagctcagccagagtctcaa

SEQ ID NO: 12 - DNA, 20 bp, Homo sapiens
ggccttacagtgcctagcaa

SEQ ID NO: 13 - DNA, 20 bp, Homo sapiens
aaaggatgaactattggtgc

SEQ ID NO: 14 - DNA, 25 bp, Homo sapiens
  misc_feature 21: n = A,T,C or G
tttacttgtacccagtatgtntctg

SEQ ID NO: 15 - DNA, 20 bp, Homo sapiens
tgaaagggagcctacgtctg

SEQ ID NO: 16 - DNA, 22 bp, Homo sapiens
tgaatgcgggagtaaataaatg

SEQ ID NO: 17 - DNA, 20 bp, Homo sapiens
agggtgagagactgctctgg

SEQ ID NO: 18 - DNA, 20 bp, Homo sapiens
ggagggagggaagaaagaga

SEQ ID NO: 19 - DNA, 20 bp, Homo sapiens
gccaaagagagaggcaggta

SEQ ID NO: 20 - DNA, 19 bp, Homo sapiens
ccagattgcttcccttggt

SEQ ID NO: 21 - DNA, 24 bp, Homo sapiens
caaaggattagctttacggtatgt

SEQ ID NO: 22 - DNA, 20 bp, Homo sapiens
tcatggctgtgggacagtag

SEQ ID NO: 23 - DNA, 21 bp, Homo sapiens
gccctaaggactacacacaca

SEQ ID NO: 24 - DNA, 20 bp, Homo sapiens
gccttccaaccatgaacaag

SEQ ID NO: 25 - DNA, 20 bp, Homo sapiens
atgggcaaagaagtggcata

SEQ ID NO: 26 - DNA, 20 bp, Homo sapiens
tacaggagactgccaccaca

SEQ ID NO: 27 - DNA, 154 bp, Homo sapiens
catgggtaagagaaagggaacatttacattttgggatcacgtaagtaaaccagttcacatgatatttcattcattcattcattcattcattcattccttttatctatacatttattgaggaccctactatgcacctggaactatgctgggagct

SEQ ID NO: 28 - DNA, 238 bp, Homo sapiens
ggcaacgttgacttccagtaagaaaggttctctgatctttttttctcttttcttttcttttcttttcttttcctttcttttcttttcttttcttccagggtctcagtttgttgtccaggccagagtgcagtggcgcaatctcggctcactgcagcctcaacatcctaggctcaagccatcctcccacctcaccctcccgagtagctggaagtacaggctcgtcttgaactctgggctg

SEQ ID NO: 29 - DNA, 296 bp, Homo sapiens
  misc_feature 7, 72, 78, 213, 242, 249, 254, 264: n = A,T,C or G
agctctncctggttcactagcagactgtctttggacttgaactgaaaccctttcctacatctctggccagtnagcctnccgtgtcagattttggatgtatcaggcttccacaattgggtgaggcgattcctttagaataaatctcttttacacacacacacacacacacacacgtgtacccacacacacgtgcatatgcacacacacacacgnacacatccatcctattgcttctgtttctntggaganccctnatacaaattngcatgtcattaaatatcactagtgttgtagct

SEQ ID NO: 30 - DNA, 368 bp, Homo sapiens
gtgtcagcaactgcacgatttctccctattcagccagtagggaatctagagcaattctattatctagtacaactttagcaagagaatttaaagtctgttatgcaaccatagcctttgcaatagaatctgctatagagatgattataaggaatttccttccttccttccttccttccttccttccttccttccttctttctttctttctttctttctttctttctttctttctttctttctttcttctttctttttctttctttctttccttctttgagacagggtcttgctcaacctcccaggctcaagcaattctccctacctcagtctcccaagtggctgggagtacagacatgtaccaccatgcc

SEQ ID NO: 31 - DNA, 171 bp, Homo sapiens
aaagctcagccagagtctcaattcctataacctccttcccatccatccattcatccatccatctatccatccatccatccatccatccatccatccatccagctgatggattaataaatttatatcaagcacttactctgagcaaggcattttgctaggcactgtaaggcc

SEQ ID NO: 32 - DNA, 319 bp, Homo sapiens
  misc_feature 290, 296: n = A,T,C or G
ctacagagcaattaaaaaaggatgaactattggtgcatttaacaacttggatgcattgcaaggaaattatgctgagtgtaaaaagcgccttccaaaggatttcatgctatgtgattccatttatataatattttcaaaatgacaaaattttaaaaatagagaacaggttagcagttgtcaggggttaaagaggaagtggtgggacaggaaggagatgatagaggaacctacacacgataaaactgtatataactaaacacacacacgcacacacacacacacacacacanacaganacatactgggtacaagtaaagct

SEQ ID NO: 33 - DNA, 400 bp, Homo sapiens
tgaaagggagcctacgtctgacccctagacttgccttgttttccaagtctcacagaatattagggctggacagaagcttgaagctcagtagttcaaccctcttttctttcagatgagagatcaagtccagagatgattaagagatttattcaaggtcacacagatagtaagcagcaaatctgaactggaactcaggtcagtttcctgacaacaaacaatactctttccactgaaccaaagtatacttccaaaatatatatacacacatatatgtatatgtgtgtacgtgtgtgtatatatatatatatgtgtgtgtgtgtgtatatatatatatgctgtaaaattgttctcttctaaagaaagaaggagcatagtactcatttatttactcccgcattca

SEQ ID NO: 34 - DNA, 218 bp, Homo sapiens
agggtgagagactgctctggagctcagtgagggacctcagggttacacaagaagggactctgcgctgggttccaggcctgattcttttattttctctttttctttctttctctttctttttctttctttcttttctttctttctttctttctttcttttctttctttctttctttctttctttctttctttctttctctctctttcttccctccctcc

SEQ ID NO: 35 - DNA, 135 bp, Homo sapiens
gccaaagagagaggcaggtacattagggtgaaccatatgaaatagctgatattcgactgtttttgacgtaaaaccgtacgtatatttcacacacacacacacacacacttttctgcaccaagggaagcaatctgg

SEQ ID NO: 36 - DNA, 211 bp, Homo sapiens
caaaggattagctttacggtatgtgaataatagctcaataaagctattatttaaaataaacgtgcacacacacacacacacacacacacacacacatacacagctcactttacaacacatcaggacaataactccatggactgatatataatgataaactacagtcctttcttttgtatactaaggtgatgctactgtcccacagccatga

SEQ ID NO: 37 - DNA, 353 bp, Homo sapiens
gccctaaggactacacacacacacacacacagagagagagagagagagagacagagagagagagagagagagagaaaatctattagaactaatcaataaatttagcaacattgcaggatacaaaattaacacacaaaagtcagtcgcatttctatacactaacaacaaacaaattcgaaaaggaaattaagaaaacaattccatttataataacatcaaaaacaaaaaaaattaggaataaaatgaactaagaaggtgaaagacttgtacactaaaaactataaaacattgctgaaaagagtaaagaagatagaaataaatagaaaggcatttcttgttcatggttggaaggc

SEQ ID NO: 38 - DNA, 277 bp, Homo sapiens
atgggcaaagaagtggcataacacttctaagataattttaagcctgggccacaaagcaagactcccatctctattaaaataataataataataataataaaattttttaaaaaaaggcttggtgcactggctcacgcctgtagtcccagaactttgagagactgaggcaggtggatcacctgaggtcaggagttcgagaccaggctggccaacatggcgaaaccccacctctactaaaaatacaaaaattagccaggtgtggtggcagtctcctgta

SEQ ID NO: 39 - DNA, 7028 bp, Homo sapiens
gggccgaggaggaggaggaggaggaggaggaggcggcggcggcggtgggccccggggagctgggctgcgacgcgccgctgccctactggacggccgtgttcgagtacgaggcggcgggcgaggacgagctgaccctgcggctgggcgacgtggtggaggtgctgtccaaggactcgcaggtgtccggcgacgagggctggtggaccgggcagctgaaccagcgggtgggcatcttccccagcaactacgtgaccccgcgcagcgccttctccagccgctgccagcccggcggcgaggaccccagttgctacccgcccattcagttgttagaaattgattttgcggagctcaccttggaagagattattggcatcgggggctttgggaaggtctatcgtgctttctggataggggatgaggttgctgtgaaagcagctcgccacgaccctgatgaggacatcagccagaccatagagaatgttcgccaagaggccaagctcttcgccatgctgaagcaccccaacatcattgccctaagaggggtatgtctgaaggagcccaacctctgcttggtcatggagtttgctcgtggaggacctttgaatagagtgttatctgggaaaaggattcccccagacatcctggtgaattgggctgtgcagattgccagagggatgaactacttacatgatgaggcaattgttcccatcatccaccgcgaccttaagtccagcaacatattgatcctccagaaggtggagaatggagacctgagcaacaagattctgaagatcactgattttggcctggctcgggaatggcaccgaaccaccaagatgagtgcggcagggacgtatgcttggatggcacccgaagtcatccgggcctccatgttttccaaaggcagtgatgtgtggagctatggggtgctactttgggagttgctgactggtgaggtgccctttcgaggcattgatggcttagcagtcgcttatggagtggccatgaacaaactcgcccttcctattccttctacgtgcccagaaccttttgccaaactcatggaagactgctggaatcctgatccccactcacgaccatctttcacgaatatcctggaccagctaaccaccatagaggagtctggtttctttgaaatgcccaaggactccttccactgcctgcaggacaactggaaacacgagattcaggagatgtttgaccaactcagggccaaagaaaaggaacttcgcacctgggaggaggagctgacgcgggctgcactgcagcagaagaaccaggaggaactgctgcggcgtcgggagcaggagctggccgagcgggagattgacatcctggaacgggagctcaacatcatcatccaccagctgtgccaggagaagccccgggtgaagaaacgcaagggcaagttcaggaagagccggctgaagctcaaggatggcaaccgcatcagcctcccttctgatttccagcacaagttcacggtgcaggcctcccctaccatggataaaaggaagagtcttatcaacagccgctccagtcctcctgcaagccccaccatcattcctcgccttcgagccatccagttgacaccaggtgaaagcagcaaaacctggggcaggagctcagtcgtcccaaaggaggaaggggaggaggaggagaagagggccccaaagaagaagggacggacgtgggggccagggacgcttggtcagaaggagcttgcctcgggagatgaaggatcccctcagagacgtgagaaagctaatggtttaagtaccccatcagaatctccacatttccacttgggcctcaagtccctggtagatggatataagcagtggtcgtccagtgcccccaacctggtgaagggcccaaggagtagcccggccctgccagggttcaccagccttatggagatggccttgctggcagccagttgggtggtgcccatcgacattgaagaggatgaggacagtgaaggcccagggagtggagagagtcgcctacagcattcacccagccagtcctacctctgtatcccattccctcgtggagaggatggcgatggcccctccagtgatggaatccatgaggagcccaccccagtcaactcggccacgagtacccctcagctgacgccaaccaacagcctcaagcggggcggtgcccaccaccgccgctgcgaggtggctctgctcggctgtggggctgttctggcagccacaggcctagggtttgacttgctggaagctggcaagtgccagctgcttcccctggaggagcctgagccaccagcccgggaggagaagaaaagacgggagggtctttttcagaggtccagccgtcctcgtcggagcaccagccccccatcccgaaagcttttcaagaaggaggagcccatgctgttgctaggagacccctctgcctccctgacgctgctctccctctcctccatctccgagtgcaactccacacgctccctgctgcgctccgacagcgatgaaattgtcgtgtatgagatgccagtcagcccagtcgaggcccctcccctgagtccatgtacccacaaccccctggtcaatgtccgagtagagcgcttcaaacgagatcctaaccaatctctgactcccacccatgtcaccctcaccaccccctcgcagcccagcagtcaccggcggactccttctgatggggcccttaagccagagactctcctagccagcaggagcccctccagcaatgggttgagccccagtcctggagcaggaatgttgaaaacccccagtcccagccgagacccaggtgaattcccccgtctccctgaccccaatgtggtcttccccccaaccccaaggcgctggaacactcagcaggactctaccttggagagacccaagactctggagtttctgcctcggccgcgtccttctgccaaccggcaacggctggacccttggtggtttgtgtcccccagccatgcccgcagcacctccccagccaacagctccagcacagagacgcccagcaacctggactcctgctttgctagcagtagcagcactgtagaggagcggcctggacttccagccctgctcccgttccaggcagggccgctgcccccgactgagcggacgctcctggacctggatgcagaggggcagagtcaggacagcaccgtgccgctgtgcagagcggaactgaacacacacaggcctgccccttatgagatccagcaggagttctggtcttagcacgaaaaggattggggcgggcaagggggacagccagcggagatgaggggagctggcgggcacagccctttctcagggttggaccccctgagatccagccctacttcttgcactgataatgcactttgaagatggaagggatggaaacagggccacttcagagggtctcctgccctgcagggcctttctacccgtgtccactggaggggctgtggccatcagctctggctgtgtaggggaggaaggggtgcatgcatgtcccccaccctccacagtcttccttgcctttagagtgaccctgcagagtcactcagccaaatctgtctgctgctccctctcctcagccagttgggtgtgcgcagagctgtcatagggtccctttgtcagccccgagttcagcttcccaaacaccagtgttggatattctgtgattgattttggtcctcctccgctgtcccccaacacccaggaatgggaatctggcttggttcgagataggagcttttctgtgtcctaagccctttcatgctagcaggaagactgaaagcaaggtggcccagtgtggggtcatagggcttgatagacctggcactgcctatctgcacttccaggtgccccacctatttatctgagcccacaggtggaaaggggaactgcctcagtgagaacggggggacggggatgttaggaaaaatacagtaaagttgcaatgaagaggttcatgaagtatgtccttgttctttttggaaactctcggcaaagggcaaaccagcaagtattgagggtacccatctagctacttggggtcaggacctcgtcagaccaggttcggatacaatcatctgctcatcccaggaatagtttcttgggggactcactcactggtgccagttctaagtcagagacaaaattccactgtctgttccttttgctgtctgaactttatgtgttactcccttcctttggtcttcactctaatccctggagtttgtgggcttttggttatgtttggttagtagatatcaccgcaatgccctagaacagctatgaagcagaataccatatggccacctggacattgggacttgggaattcactctcaactgggccatccatgttgtgatgcccttgaagtaaaatggagccagcaggagtaccttctgtaaatgcatgtggcaaagtgctatttatagggtgcccagggagccgctgatgtacaataaccttgaggtcccccatactgaaaactgaccaaggcctgtgcacaggtagcccctcatgctgggctctggaccatgagctgagtaggaaggatagcagaggccaaccctgaccttcctggaagttgtttccttaacttgaatgttgagcttcctctaaagctttctcgtgtatgtcttctccatgccactactctgaggcctcctgtgttatgtgtgaacagttgtctttatgtgggaatgacgacttgattgggagtagagtctcaaggtcattcccctcttccctcaagactctctgaatgctgctccactgtcttttgtcttggaggtcactcagcaggttccttgcatttgctgcctggatgtgcagctggcaacagtgatgaattggtcactgctctttctctataactgggatagatgtcctgccttggggtcactaaaggggtgaccttgttccttgctttatgagcccattagcactttggttcaaggggcccaccaagtcttggacgggaaggcgctactggttttattgcccaaggttttgttattgcttctcttctgtgtccttctctttgttcagtgaagccaatatgtaagatactgtttttgtccccattcccctactcctgagctaggaggaaaaaatgtgaatcttaccagcagttccagccaaccaagtgattcttcttcattcttgatggggagaagtacatacaaagtttgttctgacagggcgcggtggctcacgcctgtaatcccagcgctttgggaggcagaggcaggtggatcacctgaggtcgggagttcgagaccagcctgaccaacatggagatatcctgtctctactaaaaatacaaaaaaattagccaggcatggtggcacgtgcctgtaatcccagctactcgcaaggctgaggcaggagaatcgcttgaacctgggaggcggaggttgcagtgagccaagattgcgccattgcactccagcctgggcaacaagagagaaactctgtctcaaaaaaaaaaaaaaaaaaaaaaaaagtctgttctgtggcctccttcccccgggccctccataacctcaggctaaaccatgagcacatctgtatatccttggctccactaaatggccctcttgtggccctccaaaccatgctgcctatacacagtgctctgtggtatgaagcagagatttttcctttgctcatttttaacttttgccattgtggtaggttgcagccatctttctagatgtagtgtaactgatgtagtgtaactgaatgatggtcacctgccattgagtgagaggttgagtgccatccttacttgtccactgtggggaaagataaagcaagcctgggtctttgctaaggaaataattgtacctgaaagaagcaaaagcagggctatccaaaggtgctactgtgagcatccatgaagaaggaacagttaccatctctcagctcctacacacctggtctctgatgggcccctgactgctgcactctctcagtggggcaaggttggagatgggctaaggatctgtatagtagtagcaggtctcagtggctttctattcgctcaggttcccttgttctgtggtcctggtcgggagcaggccctggagctgtggatgaagccacttgagtggcagtagccggcccccctttcctctgccttccctttgcacaaagacacgttccttctgctcttggcaggtgctaacttcatggaagatggtaataggaacagatactgctctctgcccctgcttcttggattcttcagctcctaccgctgattcggattatccccttttgaccctcttggggatccagactgctgccaggaggctgagtagatacctcagttatctgtatgttatttctgagaggctttggcggatcctcttcacttggcatcctgtggcatccctagggtctggtggtagcagtaatagcaacaatgatatcttacatctggacaactcagaatagtgctaacttttcctcctgacctttgcaaaatgacatcattttccttgtacatttgatacccttgctagtagagaaggggaaatgcttaaagatgaaaattcaagtgaagagaaatgaaaaagtggcttggactaattgctgagtgaggccactgggctcagaactgaacaggttggctgcattccccattctgcttttgctgtgtggccataggcttgtctctttagcccctctcagatttccttcctttaaaagcaatcatcacatgctttcctctcaagggagttgggtgtatgtatcagagaaggtcagtgaaacaccatagctccttgccagctcctagaggaagcttctttcatctatacaggatgaatcgctgaagttgagagtgtggctctcatcacctttgccttgagggaacttgccttttctttcgtcctttggcttctggaagaggagtgatttggaggtggttgagcatgactaatgggggccctggtcgggcccatgcccttctgccgcatttatata

SEQ ID NO: 40 - DNA, 5096 bp, Homo sapiens
gggaggaattttgagcaggaaatgagggagcttctttctataaggacagtggatggaattaaaaaggggtatttgaggaagcgttgctgtggatcatatgaaacctttggatgctcaagaaaaataagagtcagactaatttgaatttactttaggatgccgtcttccttcccaccttaccgttgtttggacacagtactgtcctgggcttctaacattattgatcctccagaaggtggagaatggagacctgagcaacaagattctgaagatcactgattttggcctggctcgggaatggcaccgaaccaccaagatgagtgcggcagggacgtatgcttggatggcacccgaagtcatccgggcctccatgttttccaaaggcagtgatgtgtggagctatggggtgctactttgggagttgctgactggtgaggtgccctttcgaggcattgatggcttagcagtcgcttatggagtggccatgaacaaactcgcccttcctattccttctacgtgcccagaaccttttgccaaactcatggaagactgctggaatcctgatccccactcacgaccatctttcacgaatatcctggaccagctaaccaccatagaggagtctggtttctttgaaatgcccaaggactccttccactgcctgcaggacaactggaaacacgagattcaggagatgtttgaccaactcagggccaaagaaaaggaacttcgcacctgggaggaggagctgacgcgggctgcactgcagcagaagaaccaggaggaactgctgcggcgtcgggagcaggagctggccgagcgggagattgacatcctggaacgggagctcaacatcatcatccaccagctgtgccaggagaagccccgggtgaagaaacgcaagggcaagttcaggaagagccggctgaagctcaaggatggcaaccgcatcagcctcccttctgatttccagcacaagttcacggtgcaggcctcccctaccatggataaaaggaagagtcttatcaacagccgctccagtcctcctgcaagccccaccatcattcctcgccttcgagccatccagtgtgagactgtttcccaaattagctggggccagaacacacaggggcacctgtcccctgctctgtccagccaccgactggtccaggcttgctccatccataacttctgccacctctcctcgacaatgtgtatatacatgcacatattgacaccaggtgaaagcagcaaaacctggggcaggagctcagtcgtcccaaaggaggaaggggaggaggaggagaagagggccccaaagaagaagggacggacgtgggggccagggacgcttggtcagaaggagcttgcctcgggagatgaaggcctcaagtccctggtagatggatataagcagtggtcgtccagtgcccccaacctggtgaagggcccaaggagtagcccggccctgccagggttcaccagccttatggagatggccttgctggcagccagttgggtggtgcccatcgacattgaagaggatgaggacagtgaaggcccagggagtggagagagtcgcctacagcattcacccagccagtcctacctctgtatcccattccctcgtggagaggatggcgatggcccctccagtgatggaatccatgaggagcccaccccagtcaactcggccacgagtacccctcagctgacgccaaccaacagcctcaagcggggcggtgcccaccaccgccgctgcgaggtggctctgctcggctgtggggctgttctggcagccacaggcctagggtttgacttgctggaagctggcaagtgccagctgcttcccctggaggagcctgagccaccagcccgggaggagaagaaaagacgggagggtctttttcagaggtccagccgtcctcgtcggagcaccagccccccatcccgaaagcttttcaagaaggaggagcccatgctgttgctaggagacccctctgcctccctgacgctgctctccctctcctccatctccgagtgcaactccacacgctccctgctgcgctccgacagcgatgaaattgtcgtgtatgagatgccagtcagcccagtcgaggcccctcccctgagtccatgtacccacaaccccctggtcaatgtccgagtagagcgcttcaaacgagatcctaaccaatctctgactcccacccatgtcaccctcaccaccccctcgcagcccagcagtcaccggcggactccttctgatggggcccttaagccagagactctcctagccagcaggagcccctccagcaatgggttgagccccagtcctggagcaggaatgttgaaaacccccagtcccagccgagacccaggtgaattcccccgtctccctgaccccaatgtggtcttccccccaaccccaaggcgctggaacactcagcaggactctaccttggagagacccaagactctggagtttctgcctcggccgcgtccttctgccaaccggcaacggctggacccttggtggtttgtgtcccccagccatgcccgcagcacctccccagccaacagctccagcacagagacgcccagcaacctggactcctgctttgctagcagtagcagcactgtagaggagcggcctggacttccagccctgctcccgttccaggcagggccgctgcccccgactgagcggacgctcctggacctggatgcagaggggcagagtcaggacagcaccgtgccgctgtgcagagcggaactgaacacacacaggcctgccccttatgagatccagcaggagttctggtcttagcacgaaaaggattggggcgggcaagggggacagccagcggagatgaggggagctggcgggcacagccctttctcagggttggaccccctgagatccagccctacttcttgcactgataatgcactttgaagatggaagggatggaaacagggccacttcagagggtctcctgccctgcagggcctttctacccgtgtccactggaggggctgtggccatcagctctggctgtgtaggggaggaaggggtgcatgcatgtcccccaccctccacagtcttccttgcctttagagtgaccctgcagagtcactcagccaaatctgtctgctgctccctctcctcagccagttgggtgtgcgcagagctgtcatagggtccctttgtcagccccgagttcagcttcccaaacaccagtgttggatattctgtgattgattttggtcctcctccgctgtcccccaacacccaggaatgggaatctggcttggttcgagataggagcttttctgtgtcctaagccctttcatgctagcaggaagactgaaagcaaggtggcccagtgtggggtcatagggcttgatagacctggcactgcctatctgcacttccaggtgccccacctatttatctgagcccacaggtggaaaggggaactgcctcagtgagaacggggggacggggatgttaggaaaaatacagtaaagttgcaatgaagaggttcatgaagtatgtccttgttctttttggaaactctcggcaaagggcaaaccagcaagtattgagggtacccatctagctacttggggtcaggacctcgtcagaccaggttcggatacaatcatctgctcatcccaggaatagtttcttgggggactcactcactggtgccagttctaagtcagagacaaaattccactgtctgttccttttgctgtctgaactttatgtgttactcccttcctttggtcttcactctaatccctggagtttgtgggcttttggttatgtttggttagtagatatcaccgcaatgccctagaacagctatgaagcagaataccatatggccacctggacattgggacttgggaattcactctcaactgggccatccatgttgtgatgcccttgaagtaaaatggagccagcaggagtaccttctgtaaatgcatgtggcaaagtgctatttatagggtgcccagggagccgctgatgtacaataaccttgaggtcccccatactgaaaactgaccaaggcctgtgcacaggtagcccctcatgctgggctctggaccatgagctgagtaggaaggatagcagaggccaaccctgaccttcctggaagttgtttccttaacttgaatgttgagcttcctctaaagctttctcgtgtatgtcttctccatgccactactctgaggcctcctgtgttatgtgtgaacagttgtctttatgtgggaatgacgacttgattgggagtagagtctcaaggtcattcccctcttccctcaagactctctgaatgctgctccactgtcttttgtcttggaggtcactcagcaggttccttgcatttgctgcctggatgtgcagctggcaacagtgatgaattggtcactgctctttctctataactgggatagatgtcctgccttggggtcactaaaggggtgaccttgttccttgctttatgagcccattagcactttggttcaaggggcccaccaagtcttggacgggaaggcgctactggttttattgcccaaggttttgttattgcttctcttctgtgtccttctctttgttcagtgaagccaatatgtaagatactgtttttgtccccattcccctactcctgagctaggaggaaaaaatgtgaatcttaccagcagttccagccaaccaagtgattcttcttcattcttgatggggagaagtacatacaaagtttgttctgacagggcgcggtggctcacgcctgtaatcccagcgctttgggaggcagaggcaggtggatcacctgaggtcgggagttcgagaccagcctgaccaacatggagatatcctgtctctactaaaaatacaaaaaaattagccaggcatggtggcacgtgcctgtaatcccagctactcgcaaggctgaggcaggagaatcgcttgaacctgggaggcggaggttgcagtgagccaagattgcgccattgcactccagcctgggcaacaagagagaaactctgtctcaaaaaaaaaaaaaaaaaaaaaaaaa

SEQ ID NO: 41 - DNA, 983 bp, Homo sapiens
ggactcgcaggtgtccggcgacgagggctggtggaccgggcagctgaaccagcgggtgggcatcttccccagcaactacgtgaccccgcgcagcgccttctccagccgctgccagcccggcggcgaggaccccagttgctacccgcccattcagttgttagaaattgattttgcggagctcaccttggaagagattattggcatcgggggctttgggaaggtctatcgtgctttctggataggggatgaggttgctgtgaaagcagctcgccacgaccctgatgaggacatcagccagaccatagagaatgttcgccaagaggccaagctcttcgccatgctgaagcaccccaacatcattgccctaagaggggtatgtctgaaggagcccaacctctgcttggtcatggagtttgctcgtggaggacctttgaatagagtgttatctgtaaagaggacacaattgcataatggtatgtacttaaaatcacttggagcatcctgtcccagagaggagggcatttgagttgaaggactttgggtgggggaagcatgggcccccagggacttcactctctttgcatccttcagctttgagcctggaaatccttcagactttgttttgctccaggctgttccagatgtggtttatttttctgttgatactatggtgaatctgtttactttaaaaactacattttaaggccaggcgcggtggctcacgcctgtaatcccagcactttgggaggccaaggcgggcagatcatgaggtcaggagatcgagaccatcctggctaacacggtgaaaccccgtctccactaaaaatacaaaaaattagccggacatggtggcgggagcctgtagtcccagctactcgggaggctgaggcaggagaatggtgtgaacccgggaggtggagcttgcagtgagccgagattgtgcctctgcactccagcctgggtgacagagcgagactccatct

SEQ ID NO: 42 - DNA, 572 bp, Homo sapiens
tcatgagtcttagttcctattgaagaaataaaagtatattctatccagacttgagtgaagacccctttaatgtcagaaattttgagaacttctatgtgatattatttctggttttagtaccttttgactaaagaaaacacgtgatgaacaaaagccattttgaattcagtaatgttaagtgagttttgcatcctcatccttttaaaaaataatacatatttgtccaaaacatgcatacctgtctatagactgcttgggtatctatggattcacagtccccctgcaaccgtgctgcagctgcccagggatctttgtcctgggcctgtcttggcttaaacaggaccatcttgttaagattctttcatggtgtgggctttgtgtctggacagtgggaaggcagctggcgatgtggtgtgaatccagccttgggtgttttggtgtgggagaggctgagctggatgtgccctccattgcctgctactgattctctttattcattgaagatcccctcagagacgtgagaaagctaatggtttaagtaccccatcagaatctccacatttccacttggg

SEQ ID NO: 43 - DNA, 411 bp, Homo sapiens
acagaactgctgcatttcatttccattttcactctttatggttgtaatggtggacagtttgctttacttcctgagccttatttgaggttacctaaattctgatctctgtttctggaagaagtaagaggtagttttctgggaagtgaggccatgtaatagcctaagtcttacatgtttgcttctgtccattcatgctttctgagtattcacatgttctattcagactgctggaatcctgatccccactcacgaccatctttcacgaatatcctggaccagctaaccaccatagaggagtctggtttctttgaaatgcccaaggactccttccactgcctgcaggacaactggaaacacgagattcaggagatgtttgaccaactcagggccaaagaaaaggtaaacaaaaca

SEQ ID NO: 44 - protein, 1071 aa, Homo sapiens
LGCDAPLPYWTAVFEYEAAGEDELTLRLGDVVEVLSKDSQVSGDEGWWTGQLNQRVGIFPSNYVTPRSAFSSRCQPGGEDPSCYPPIQLLEIDFAELTLEEIIGIGGFGKVYRAFWIGDEVAVKAARHDPDEDISQTIENVRQEAKLFAMLKHPNIIALRGVCLKEPNLCLVMEFARGGPLNRVLSGKRIPPDILVNWAVQIARGMNYLHDEAIVPIIHRDLKSSNILILQKVENGDLSNKILKITDFGLAREWHRTTKMSAAGTYAWMAPEVIRASMFSKGSDVWSYGVLLWELLTGEVPFRGIDGLAVAYGVAMNKLALPIPSTCPEPFAKLMEDCWNPDPHSRPSFTNILDQLTTIEESGFFEMPKDSFHCLQDNWKHEIQEMFDQLRAKEKELRTWEEELTRAALQQKNQEELLRRREQELAEREIDILERELNIIIHQLCQEKPRVKKRKGKFRKSRLKLKDGNRISLPSDFQHKFTVQASPTMDKRKSLINSRSSPPASPTIIPRLRAIQLTPGESSKTWGRSSVVPKEEGEEEEKRAPKKKGRTWGPGTLGQKELASGDEGSPQRREKANGLSTPSESPHFHLGLKSLVDGYKQWSSSAPNLVKGPRSSPALPGFTSLMEMALLAASWVVPIDIEEDEDSEGPGSGESRLQHSPSQSYLCIPFPRGEDGDGPSSDGIHEEPTPVNSATSTPQLTPTNSLKRGGAHHRRCEVALLGCGAVLAATGLGFDLLEAGKCQLLPLEEPEPPAREEKKRREGLFQRSSRPRRSTSPPSRKLFKKEEPMLLLGDPSASLTLLSLSSISECNSTRSLLRSDSDEIVVYEMPVSPVEAPPLSPCTHNPLVNVRVERFKRDPNQSLTPTHVTLTTPSQPSSHRRTPSDGALKPETLLASRSPSSNGLSPSPGAGMLKTPSPSRDPGEFPRLPDPNVVFPPTPRRWNTQQDSTLERPKTLEFLPRPRPSANRQRLDPWWFVSPSHARSTSPANSSSTETPSNLDSCFASSSSTVEERPGLPALLPFQAGPLPPTERTLLDLDAEGQSQDSTVPLCRAELNTHRPAPYEIQQEFWS

SEQ ID NO: 45 - protein, 869 aa, Homo sapiens
LILQKVENGDLSNKILKITDFGLAREWHRTTKMSAAGTYAWMAPEVIRASMFSKGSDVWSYGVLLWELLTGEVPFRGIDGLAVAYGVAMNKLALPIPSTCPEPFAKLMEDCWNPDPHSRPSFTNILDQLTTIEESGFFEMPKDSFHCLQDNWKHEIQEMFDQLRAKEKELRTWEEELTRAALQQKNQEELLRRREQELAEREIDILERELNIIIHQLCQEKPRVKKRKGKFRKSRLKLKDGNRISLPSDFQHKFTVQASPTMDKRKSLINSRSSPPASPTIIPRLRAIQCETVSQISWGQNTQGHLSPALSSHRLVQACSIHNFCHLSSTMCIYMHILTPGESSKTWGRSSVVPKEEGEEEEKRAPKKKGRTWGPGTLGQKELASGDEGLKSLVDGYKQWSSSAPNLVKGPRSSPALPGFTSLMEMALLAASWVVPIDIEEDEDSEGPGSGESRLQHSPSQSYLCIPFPRGEDGDGPSSDGIHEEPTPVNSATSTPQLTPTNSLKRGGAHHRRCEVALLGCGAVLAATGLGFDLLEAGKCQLLPLEEPEPPAREEKKRREGLFQRSSRPRRSTSPPSRKLFKKEEPMLLLGDPSASLTLLSLSSISECNSTRSLLRSDSDEIVVYEMPVSPVEAPPLSPCTHNPLVNVRVERFKRDPNQSLTPTHVTLTTPSQPSSHRRTPSDGALKPETLLASRSPSSNGLSPSPGAGMLKTPSPSRDPGEFPRLPDPNVVFPPTPRRWNTQQDSTLERPKTLEFLPRPRPSANRQRLDPWWFVSPSHARSTSPANSSSTETPSNLDSCFASSSSTVEERPGLPALLPFQAGPLPPTERTLLDLDAEGQSQDSTVPLCRAELNTHRPAPYEIQQEFWS

SEQ ID NO: 46 - protein, 85 aa, Homo sapiens
MDSQSPCNRAAAAQGSLSWACLGLNRTILLRFFHGVGFVSGQWEGSWRCGVNPALGVLVWERLSWMCPPLPATDSLYSLKIPSET

SEQ ID NO: 47 - protein, 80 aa, Homo sapiens
MFASVHSCFLSIHMFYSDCWNPDPHSRPSFTNILDQLTTIEESGFFEMPKDSFHCLQDNWKHEIQEMFDQLRAKEKVNKT

SEQ ID NO: 48 - DNA, 22 bp, Homo sapiens
tgagactctttcttttgcttgg

SEQ ID NO: 49 - DNA, 22 bp, Homo sapiens
aacaattcaggaaataaaggag

SEQ ID NO: 50 - DNA, 371 bp, Homo sapiens
ggattacaggtgtgagccaccgcgtcctgcctggctgggttatttcaaaaggcccatcttcaggttctgagactctttcttttgcttggtttagtctattgttgatgcttttgagtgtactttgtattttttcaaggacttcttcagttccaaaattttggtttgtttcttttttattctatcactgtggtaaactgctcctttatttcctgaattgtttttctgatttctttgtattgttttttgaaattctcttgtatctcattgggcttctttagtatcataattttgaattctttttctgggacttcttttttttttttttttgagacagagttttgctcttgttgcccaggctggagtgcaatggt

SEQ ID NO: 51 - DNA, 23 bp, Homo sapiens
ttgcttcaaatagtggggtgaat

SEQ ID NO: 52 - DNA, 23 bp, Homo sapiens
aggacaaggaccaaagtttacga

SEQ ID NO: 53 - DNA, 406 bp, Homo sapiens
cagtgtgatagagactcttttatttgcttcaaatagtggggtgaataagttataagagtatcactgggccagtgttgatgattttcttttctctcttgttccccatgttcttcaaactgcttaaaagtcaaaacacaatatgtattttgagttcttgaccttatcctggccctgacttagtttgtcagaatattatgttgtctacagagatccaacctggtttccatctaaatttttttatattttggacaactttctatatctttatttaaataactgtaagtattccgttcagtataataaaaatttatgtttttcttcatcgtaaactttggtccttgtccttgttactttaaaacagagaacttagtaaatataactttttcatatatttctcatttttctc

SEQ ID NO: 54 - DNA, 23 bp, Homo sapiens
gatggacatttatgttgttgcca

SEQ ID NO: 55 - DNA, 24 bp, Homo sapiens
gacagtaagagttgtgatccagca

SEQ ID NO: 56 - DNA, 439 bp, Homo sapiens
tcataaaatgctgcttttttctttcttgtggttttgtggtatctattgtatagctgtattataattttttttgaactatgtccttactgatggacatttatgttgttgccagtcttttcattacaatgactaatgttgttttcttagttttcacttttcaattcatttcctaatttagtctgagcctacatattagtgccaagaactgaggtatttattgtgttctgacacatctgaggtatttgcatatagacatctgggtacatatgcacactgctgaactgtctaataatagtctctatccccaggacactctcctaaggtaaaacctatatattggaattcttatgctgtacatatatgctggatcacaactcttactgtcagactagagagtttcaacttttaacctgtgatttcagttattgtgacatatcct

SEQ ID NO: 57 - DNA, 19 bp, Homo sapiens
ggcatgcacctgtacttgg

SEQ ID NO: 58 - DNA, 20 bp, Homo sapiens
tggatgagacagtgagatcc

SEQ ID NO: 59 - DNA, 242 bp, Homo sapiens
  misc_feature 142: n = A,T,C or G
gccactgactccagcctggcgacagagggagactccatctcaaaaaaaaaaaaaaaaaattacccgggtatggtggcatgcacctgtacttggatgtcccagtggcatgctcccagctacttgggaggctgatgtgggaggntcacttgaacccaagagtgcaaggttatagtgagattttttaaaaaaagttattttttgagacaggatctcactgtctcatccaggctggagtgcaatgg

SEQ ID NO: 60 - DNA, 23 bp, Homo sapiens
acatctctttccccaggctattc

SEQ ID NO: 61 - DNA, 23 bp, Homo sapiens
cacaggtttcttacttgcccaat

SEQ ID NO: 62 - DNA, 460 bp, Homo sapiens
ctttctaatcctgaccaccatgactctacctagtactggctcccctgcttctttgacttcactctctacatctctttccccaggctattcttaatttatctccttctcctaccataactttttaatgtatcacaaaatgcagagacatcctctgctcttttctcttttagtatctttttcttacagtcttgcctttggatttggcaaactctagatgtattttctcctaactctgtgtggatgacttcctaatcttaatcactatgcttcaccctgtcatgtgaatttcgattttctatcttcccccactgcaagctgaacatctctaccattttgccttattatttcaaattcagaagccatgtaaaactgaattgggcaagtaagaaacctgtgggaatgaattaaaattggagatatcaatgaatcaattcatgatttctaaaatatgcatatatgc

SEQ ID NO: 63 - DNA, 26 bp, Homo sapiens
ggttaccaaaggtttttaaatctgga

SEQ ID NO: 64 - DNA, 23 bp, Homo sapiens
cgattccaaatgctagctgaact

SEQ ID NO: 65 - DNA, 403 bp, Homo sapiens
ttggatttgatatttggttaccaaaggtttttaaatctggatttaggaactcatttgagattttttttttgagaatataacttttaaataacaagtcagctcacgttaattaatgtttaatgttttggggacatttacatttagcttttcttaaccttttaaatgtgttcactaaatattattttatttctaactgctggctaagcaagttatactgtgtgtataaagtgcccaagtctaagaggcattgtagacaggctatttttagggaaactcatgtttttctttaaaagttcagctagcatttggaatcgatatacagtataatatttaaaaaaaaaacaacatatttcctcattctccaagaggtttcttaaaatagcatgtaatcttacctacagtg

SEQ ID NO: 66 - DNA, 25 bp, Homo sapiens
tgttttggggacatttacatttagc

SEQ ID NO: 67 - DNA, 23 bp, Homo sapiens
aaatttgaggcttttcccactgt

SEQ ID NO: 68 - DNA, 432 bp, Homo sapiens
agaatataacttttaaataacaagtcagctcacgttaattaatgtttaatgttttggggacatttacatttagcttttcttaaccttttaaatgtgttcactaaatattattttatttctaactgcatgctaagcaagttatactgtgtgtataaagtgcccaagtctaagaggcattgtagacaggctatttttagggaaactcatgtttttctttaaaagttcagctagcatttggaatcgatatacagtataatatttaaaaaataaacaacatatttcctgatcctccaagaggtttcttaaaatagcatgtaatcttacctacagtgggaaaagcctcaaattttataaattgggttggatctaacccagattacctgaccaagagagtccccaagaaaaacaaggtgtggtaaaggttatagtaat

SEQ ID NO: 69 - DNA, 23 bp, Homo sapiens
attttccagagcagctgacaaac

SEQ ID NO: 70 - DNA, 23 bp, Homo sapiens
tcccaaggcgatttatgacttta

SEQ ID NO: 71 - DNA, 631 bp, Homo sapiens
gcggaattcttttttctccctcaagacgtacttctgtccagggagttagggcccactgtgtgttcctgggagctaacatttcctggggagtgtttagggatttcacatttaccctaaacaaaataacatataaaactttaagtctaaattccacagagctttttaaaaggaggggccttgtctctccttggcttacagcagccctgaaggcttgttgtatctcattcattttggccattttccagagcagctgacaaactgaaaataagcacactgctgtctcccctccttcactccccgcactaccttccccggctcctgacaaccaccactcctcacacccacagatccatgagggtcaggcccattctcagaataatgtggaggtgaaccctacctccacctcattgctccgactttaataccaatcttgaacagtcttggtttgggatttcaaatgtaagtcattcttggcctaaatcacattgtgggattagagccctactcaacttgtgagagcaggaattcgccttttagggatatgcgtctaaagtcataaatcgccttgggagatatgcccacctccacttttaaactgcctctgaatctctgtccttttagataagcaaca

SEQ ID NO: 72 - DNA, 23 bp, Homo sapiens
aagatccacataaaaatgcaggc

SEQ ID NO: 73 - DNA, 23 bp, Homo sapiens
taatagctgctttggcgctttag

SEQ ID NO: 74 - DNA, 549 bp, Homo sapiens
ctacttaaaggaattgatgaaattgtgattgtttcccttaaaagtaaactgtatagcttgatatctcaggcattatagtaagaaaattaagcttcttgactcagaaacaaatatagaaacaagccatgactcatttttaccatcattctattccagaaacttaaaagcatagcctgcatagtgaagatccacataaaaatgcaggcacatttgctgcagtgctaagagcagaagatatcaattaattagagaagtgtgaaaataaagacaggacgaatgagggggactggtagggagacaggaagaaggagtgacaaacaacagcaaaaatatcttaaataaataattcagaatggatgctaaatacaaaagtgggagccaagccagactaaagttcagatgcatctagggttactttgtgcaacacatttattcactaaagcgccaaagcagctattagaggaaacaataaagaggccctctcccctggaaatttgagtcctgctttggaatttttatgacatttcttccttaacaaacaagaaggtc

SEQ ID NO: 75 - DNA, 23 bp, Homo sapiens
aagcaatgctgtctgtgtctgta

SEQ ID NO: 76 - DNA, 23 bp, Homo sapiens
tgtaccacatgattgggagtttg

SEQ ID NO: 77 - DNA, 20 bp, Homo sapiens
ctttgttcctcttagagtgc

SEQ ID NO: 78 - DNA, 19 bp, Homo sapiens
tattctgccttggattccc

SEQ ID NO: 79 - DNA, 312 bp, Homo sapiens
gccactgcactccagcctggtgacagagcgagaccctgtctcaaaataataataataaataaagaaacaggcccgtgaacagcatcagcagtttcagctactaatactagcagtctttgttcctcttagagtgcagagagctgctggtcacttttgatctttattaaaacacccatacacagtaagattgcttgggaatccaaggcagaatatatctgtgtggtttgagagaggactttaaagtgttagagagtctaatcttagagcacactaaaaagagagtagatacactaccccaggacagagatgaaa

SEQ ID NO: 80 - DNA, 20 bp, Homo sapiens
gacagagtaagactccatcc

SEQ ID NO: 81 - DNA, 20 bp, Homo sapiens
taggccaaatggacattggc

SEQ ID NO: 82 - DNA, 326 bp, Homo sapiens
  misc_feature 7, 74, 78, 79: n = A,T,C or G
gccattncactccagcctgggtgacagagtaagactccatccaaaaaaaatgaaaaaataaaaaataaaaagtngggnnaggagaattcctttgccctgtaaagagaacagaacattctagtttgttctttttaggctaatcaggtctaaaaagcctaagaccaagattttacaatgacactcagccaatgtccatttggcctatatgtcaaatgaggtccatctcttgttcttatatggcccatgagctcagaatagttattacagttttaaatagctgaaaaaaagacaaaaaaaattttgtgacatgtagaaattatataaat

SEQ ID NO: 83 - DNA, 23 bp, Homo sapiens
tctgctaattctttttggcaacc

SEQ ID NO: 84 - DNA, 23 bp, Homo sapiens
atcggcccagataaaagaggtag

SEQ ID NO: 85 - DNA, 636 bp, Homo sapiens
ggtgggagaatggaggatgaatgggacttgggccttagcatgcactggctgtgggattctgaggaattaacttgttcgaggctgtgtgctcatttgtgaaaatgtaggtaaaacacctgcctcacagggtttctgttaatataaaaattaaaggagaaaaatgaaaatatgtacatgactaaagttaattcctttcccaattaggtttctggtgctttagttcttagaagcacctctacctagctttagcaatatttccctagtaataaaacatcacctgtaaactgattcagcaatacataaacagcagaattctgctaattctttttggcaaccagacaggccaaaaagatagctattaagataagaatcaattctaaaatgttccctatgggctctcttttctatgtgattgtcagaggtctcaggatgtccacagccataaaaatagttgtcaaaacatttttttcagaagctttctcttgtatccctttttctaccacagctgtgacaccagcactttgtgtccatcactaataatcccacttcctcaggacccaacagaactgcttcttgatcctgctcctttaaaagacgaataacagtgttagcctacctcttttatctgggccgatt

SEQ ID NO: 86 - DNA, 23 bp, Homo sapiens
tctgctaattctttttggcaacc

SEQ ID NO: 87 - DNA, 23 bp, Homo sapiens
ggagaaggatcaagaagcagttc

SEQ ID NO: 88 - DNA, 689 bp, Homo sapiens
  misc_feature 535: n = A,T,C or G
acatattctgcctttactctggcaggtgaacattagcttgaagacttagctatgaccggtgggagaatggaggatgaaggggacttgggccttagcatgcactggctgtgggattctgaggaattaacttgttcgaggctgtgtgctcatttgtgaaaatgtaggttaaacacctgcctcacagggtttctgttaatataaaaattaaaggagaaaaatgaaaatatgtacatgactaaagttaattcctttcccaattaggtttctggtgctttagttcttagaagcacctctacctagctttagcaatatttccctagtaataaaacatcacctgtaaactgattcagcaatacataaacagcagaattctgctaattctttttggcaaccagacaggccaaaaagatagctattaagataagaatcaattctaaaatgttccctatgggctctcttttctatgtgattgtcagaggtctcaggatgtccacagccataaaaatagttgtcaaaacatttttttcagaagctntctcttgtttccctttttctaccacagctgtgacaccagcactttgtgtccatcactaataatcccacttcctcaggacccaacagaactgcttcttgatccttctcctttaaaagacgaataacagtgttagcctacctcttttatctgggcc

SEQ ID NO: 89 - DNA, 23 bp, Homo sapiens
tttcacatatgagcacacagcct

SEQ ID NO: 90 - DNA, 23 bp, Homo sapiens
acgtgtgcagaaagaatgaaaca

SEQ ID NO: 91 - DNA, 437 bp, Homo sapiens
atgttttattactagggaaatattgctaaagctaggtagaggtgcttctaagaactaaagcaccagaaacctaattgggaaaggaattaactttagtcatgtacatattttcatttttctcctttaatttttatattaacagaaaccctgtgaggcaggtgttttacctacattttcacatatgagcacacagcctcgaacaagttaattcctcagaatcccacagccagtgcatgctaaggcccaagtccccttcatcctctattctcccaccggtcatagctaagtcttcaagctaatgttcacctgccacagtaaatgcagaatatttgaattctcttgtatttgttttagtttagttattgactatgtttttcgtcctataaagtaaatatgtttcattctttctgcacacgttttcctataatgcctgggtg

SEQ ID NO: 92 - DNA, 22 bp, Homo sapiens
actgtgggaacattcattctcc

SEQ ID NO: 93 - DNA, 25 bp, Homo sapiens
attcacattttacagatgggttagc

SEQ ID NO: 94 - DNA, 163 bp, Homo sapiens
  misc_feature 52: n = A,T,C or G
tgtaagctacatagagcaaatctaatctactcacactgaagtcagggctctntaaaagactgtgggaacattcattctccactctctcagagactcttttaggtaagtcaaagcatgttctctttctgtgattgctaacccatctgtaaaatgtgaataataa

SEQ ID NO: 95 - DNA, 20 bp, Homo sapiens
cagggcagacacctttcagg

SEQ ID NO: 96 - DNA, 20 bp, Homo sapiens
actgctgtattttgggctgg

SEQ ID NO: 97 - DNA, 520 bp, Homo sapiens
  misc_feature 519: n = A,T,C or G
ccagggcagacacctttcagggtggtctactaactgcacatggccttaagcacctgggcccaaatgctgcaacagacaaatgtagttcagtgattcttggctggagggtgattttattggcaatgtctaactcgcagtgttactggcatctagagggtagaggctggtgatgctgctaaccattttataatgcataggacagcatcctacaacaaagaattatccagcccaaaatacagcagtgctgaagttgagaacccctgggtcagataacaccaaccatatatatctatttcctggttcaagcaggaacaggaatgaatgagatgggaaatcaataaccaaggtctcaacaagcctggggatatcagattgaaagagaatttagtgtaagaaagaataaaatttggggtaacctcagttcattatgcacacaattcaaaatatgcacaaattaatgtgaaaacaaataatctagattgttccgatctgatcacatcattcccctacttaaaatgna

SEQ ID NO: 98 - DNA, 22 bp, Homo sapiens
tggtctactaactgcacatggc

SEQ ID NO: 99 - DNA, 21 bp, Homo sapiens
ggttctcaacttcagcactgc

SEQ ID NO: 100 - DNA, 333 bp, Homo sapiens
  misc_feature 5, 235: n = A,T,C or G
acaanggcagacacctttcagggtggtctactaactgcacatggccttaagcacctgggcccaaatgctgcaacagacaaatgtagttcagtggttcttggctggagggtgattttattggcaatgtctaactcgcagtgttactggcatctagagggtagaggctggtgatgctgctaaccattttataatgcataggacagcatcctacaacaaagatttatccagcccaaantacagcagtgctgaagttgagaacccctgggtcagataacaccaaccatatatatctatttcctgggttcaaggcaggaacagggaatgaatgagatg

SEQ ID NO: 101 - DNA, 23 bp, Homo sapiens
gattttattggcaatgtctaact

SEQ ID NO: 102 - DNA, 23 bp, Homo sapiens
tggataaatctttgttgtaggat

SEQ ID NO: 103 - DNA, 117 bp, Homo sapiens
gattttattggcaatgtctaactcgcagtgttactggcatctagagggtagaggctggtgatgctgctaaccattttataatgcataggacagcatcctacaacaaagatttatcca

SEQ ID NO: 104 - DNA, 20 bp, Homo sapiens
gattttattggcaatgtcta

SEQ ID NO: 105 - DNA, 20 bp, Homo sapiens
tggataaatctttgttgtag

SEQ ID NO: 106 - DNA, 117 bp, Homo sapiens; identical to SEQ ID NO: 103

SEQ ID NO: 107 - DNA, 23 bp, Homo sapiens
tgtgtaactagttgcgctggaga

SEQ ID NO: 108 - DNA, 23 bp, Homo sapiens
cctcgctagaaggcactttgtaa

SEQ ID NO: 109 - DNA, 20 bp, Homo sapiens
tctagcttttccagccctcg

SEQ ID NO: 110 - DNA, 20 bp, Homo sapiens
gatccccctctggttgttca

SEQ ID NO: 111 - DNA, 412 bp, Homo sapiens
  misc_feature 348: n = A,T,C or G
ggattcatttacttcattactctttctagggcacttgaaaatttatataatcccatttgtagtttgtaagaccagacttcatgaggatttgaggagaaattgtataaatgtgaatatttttatcgagtttttcttccttcttccaagtataaccagccttactctagcttttccagccctcgctagaaggcactttgtaatagcaagagtttcccaagtgaaggcctcggcaactcctctctgcctcatgctctgcctcattcatcgctagagaaccttccttagtgccaggaccccccatctcctctagacttacttcattcactgtgctcttactgcaagtccggnttacatgcttatctgtttcctcaagtagactgtgaacaaccagagggggatcaaccatctcttt

SEQ ID NO: 112 - DNA, 19 bp, Homo sapiens
caacaatagcatggaccgg

SEQ ID NO: 113 - DNA, 20 bp, Homo sapiens
ctgggggacttctacccttc

SEQ ID NO: 114 - DNA, 250 bp, Homo sapiens
ttgcaaaaggagaatagttccgctttctattttactacaacaatagcatggaccggctccttcaagtgtttcaaaaagcagcctgagaaatctctaaccagcccctcagtctctccagcctgccgctttattgtccttcccatcccagtgaacaaaggggagggaagggtagaagtcccccagttgctgactgttctcagcatcctaatccttgagaaccggtgagggaaatggcctgtggagctggtaa

SEQ ID NO: 115 - DNA, 20 bp, Homo sapiens
ctgggggacttctacccttc

SEQ ID NO: 116 - DNA, 21 bp, Homo sapiens
caagtgtttcaaaaagcagcc

SEQ ID NO: 117 - DNA, 361 bp, Homo sapiens
  misc_feature 257, 272, 306, 337: n = A,T,C or G
ctccacaggccatttccctcaccggttctcaaggattaggatgctgagaacagtcagcaactgggggacttctacccttccctcccctttgttcactgggatgggaaggacaataaagcggcaggctggagagactgaggggctggttagagatttctcaggctgctttttgaaacacttgaaggagccggtccatgctattgttgtagtaaaatagaaagcggaactattctccttttgcaaaaaaaaaaaaaagnaagaaaaaaagtaantgaaagaccccccctcctcccagcatcttcaggnggcctcaactcaggccattaacatggtaatnccatcctgtttgcatctcctttgt

SEQ ID NO: 118 - DNA, 23 bp, Homo sapiens
ctgcataagcagctcagtgaaaa

SEQ ID NO: 119 - DNA, 23 bp, Homo sapiens
gcttacttgcctgtaatgctggt

SEQ ID NO: 120 - DNA, 333 bp, Homo sapiens
ttcactgcatatggtcctgccatgcgccagaaggcaataggccaggccactggatggagaagaccccatccctgccttgctgcataagcagctcagtgaaaaagccaggcagacataccaggaacatcacagccatacggcaagtgctcagacagaggtatcaggccatgggagcaccaaggagtcactgcatctgggccctgtcagaggtggggacagtggaccccagtgttaaaggaagatggtgacaggagaccagcattacaggcaagtaagcacagcatccacattggcccagaggcatggacacaggtggcatatctggggaacact

SEQ ID NO: 121 - DNA, 23 bp, Homo sapiens
acctttcctacttgtttcagccc

SEQ ID NO: 122 - DNA, 23 bp, Homo sapiens
ttgatgaaagacaacaccaccac

SEQ ID NO: 123 - DNA, 22 bp, Homo sapiens
aggtgagggtcttgcagctgtg

SEQ ID NO: 124 - DNA, 22 bp, Homo sapiens
attacatcgggctgcaggccgg

SEQ ID NO: 125 - DNA, 239 bp, Homo sapiens
  misc_feature 53, 143, 144, 149, 157, 162, 194, 213: n = A,T,C or G
ggagtggcgctagggggaggtgagggtcttgcagctgtgattcagcggcaagnaacacagaacctggtcctgtgtaaacagagctaaaaccgaggatctggactatcagaggcctctactcacctatcttcaacaaatcaatnncccangtgcttgnggggnaccccccataagctaaagcaggggtaagcaanccatggccgactggttcanatccggcctgcagcccgatgtaatta

SEQ ID NO: 126 - DNA, 23 bp, Homo sapiens
gctgaagtggacagaggaatgat

SEQ ID NO: 127 - DNA, 23 bp, Homo sapiens
tggaaggtagccatcatcaaaat

SEQ ID NO: 128 - DNA, 558 bp, Homo sapiens
tagtgctttgggacacctctaggagtggaagaaatggtcagatttacaggcagcataaagtgaaatgctgaagtggacagaggaatgatccgggccagcctgggcattctcatggcctacaggacagagcgcttctctgaggctggaagggttactgcagccttcacttggcacccacagccctgagacatggaaagaagggaaacaggtaccaaatcccacaagcctcagagatgatttctcactgctttgaatatgaaacctctgaaatctggtcaagctcccagaatcaccctagggggtgacaggaattttggttaagcccgtattatctgataagtggaacactaacctggctttacttcctattttgatgatggctaccttccagaaccttctttcatggaaaacatgaaaaatattctgggagaattgctattaaataacctctgctgtttaaaaacaaggccagaccatcagaccttgctctcagcaggacacatgtaagaactagtctacaataaagaagctattaaggcgtgttcagagaattagaga

SEQ ID NO: 129 - DNA, 22 bp, Homo sapiens
acatgtccctgaatagagatcc

SEQ ID NO: 130 - DNA, 19 bp, Homo sapiens
tgcgactggccatggttcc

SEQ ID NO: 131 - DNA, 197 bp, Homo sapiens
gccattgcactccagcctgggtgacagagtgaggtcctgtctcaaaaaaaaaaaaaaaaaggcacccaaaatttttagaatgactgtcacaataatagcacatgtccctgaatagagatcctaccttaatgttggttaaagggggttgctcttaaaaaggaaccatggccagtcgcagtggctcacacctgtaatcc

SEQ ID NO: 132 - DNA, 23 bp, Homo sapiens
attgggaagtttcacaccatcat

SEQ ID NO: 133 - DNA, 23 bp, Homo sapiens
ctcagtcagcaatgatttagggg

SEQ ID NO: 134 - DNA, 433 bp, Homo sapiens
  misc_feature 11, 13, 286, 348, 393, 398: n = A,T,C or G
agttgaaaatncntttaattcacccaacttaccaaacctctgtagcttagcctcgcctaccgtacacatgctcagagcacttacattaacctacaatgggcaaaatcatctaacacaaagcctactttataataaagtagggaatatctcatgtttattgaatactgtacattgtgttaaaattgggaagtttcacaccatcataaagtcaagggaatcatttaggttgaatcattataaggtctagggactgtctgtaggatgtaaatttgttaggaattagggnctcaggagtaggaattccctttaatccacatgggctttaccatgggtgctgtgccatggggnggcccccctaaatcattgctgactgaggtgggatttccggggggnagggncccaggagggtactcctggaggggggcttggtggg

SEQ ID NO: 135 - DNA, 23 bp, Homo sapiens
taattcacccaacttaccaaacc

SEQ ID NO: 136 - DNA, 23 bp, Homo sapiens
gctttgtgttagatgattttgcc

SEQ ID NO: 137 - DNA, 433 bp, Homo sapiens; identical to SEQ ID NO: 134
  misc_feature 11, 13, 286, 348, 393, 398: n = A,T,C or G

SEQ ID NO: 138 - DNA, 20 bp, Homo sapiens
aaaaacagccatccaacacc

SEQ ID NO: 139 - DNA, 18 bp, Homo sapiens
cgtggacacctttgaggg

SEQ ID NO: 140 - DNA, 408 bp, Homo sapiens
  misc_feature 1, 307, 320, 326, 355, 387, 405: n = A,T,C or G
nacaaacgtgattatctggctctcaggtgaggacctgagccaaggagattctcaaaaaacaaacaaacaaacaaaaaacagccatccaacaccaaacaaccaataactgaacaactaacaatcaaccaactaactatatgtggtagggagaataacggcccctcaaaggtgtccacggcctatttcctgaagcctataaacatgttccctgacaggaaaaagggaattaaggctgttagttagctaaccttaaaacaggcacattgtcctgggcccaacgtaatcacaagggtcctaaaagaaggangagggaggcagangagganttccaagtcagaggggtgaagttggccantggaaggaatgatttggttcggagagcttttnattgtttgcttgggcttntga

SEQ ID NO: 141 - DNA, 20 bp, Homo sapiens
tgatcctcccactggttttc

SEQ ID NO: 142 - DNA, 20 bp, Homo sapiens
actcccaccagattaggcct

SEQ ID NO: 143 - DNA, 583 bp, Homo sapiens
  misc_feature 494, 521, 548, 568: n = A,T,C or G
ggcatgataattttatttacttagccagtcctttgaaattcacagcaaggatatgagccttatgcatgatcctcccactggttttcgtacaggtgaatgaaccgattccttattgctgaaaaaaaaaaatcttacactggacttggagtcaggccacagctagactggaagcaaggagactggaaagcaaacgtggacctgacaggctctgtcatgtcccaggcctaatctggtgggagtcctgagaacagcctgtgctgtgtgtgcccaggtgcaaagaatatgtaaacctttctcaagtgaaaaagcttagctttttccaaattcccatttgagactgcctgtgcgactgcacagtgtgcacactcatgcagataggtggagtcctattcaacttctacaaaacacactaatttgttgatttgttttatttctatatggtacctttcctcctaggagctgcaaggttaataagcttcagcaatccttttacnatagagatgctgcaaggagggcagaantctaatcactctgcagaagaccagctngaggaaatgagatctccgtngggatcaaggttgta

SEQ ID NO: 144 - DNA, 20 bp, Homo sapiens
ttggagtcaggccacagcta

SEQ ID NO: 145 - DNA, 20 bp, Homo sapiens
tcgcacaggcagtctcaaat

SEQ ID NO: 146 - DNA, 583 bp, Homo sapiens; identical to SEQ ID NO: 143
  misc_feature 494, 521, 548, 568: n = A,T,C or G

SEQ ID NO: 147 - DNA, 19 bp, Homo sapiens
gttctggaccaggcattgg

SEQ ID NO: 148 - DNA, 19 bp, Homo sapiens
tgggcatgtctgcttcagc

SEQ ID NO: 149 - DNA, 326 bp, Homo sapiens
ccagcctgggcaacagagtgagactcagtctcaaaaaaaaaaaaaaaaaatccatatttaaatggccattcatgttctggaccaggcattggaaaagaacagagtttgtgttcggaggtttgtatatgtgcttgatgtctcccagtcctagtgagtcttgaatgagttaataatgtaacaggtctcctgctgaagcagacatgcccagcgcctccctgatcttcaaatcaagataaacacatacaagagcaggctgggaggggagtcctctggcaaagcaggaggacggcggccccaagcaagccctgcatgaggggaaggtgggg

SEQ ID NO: 150 - DNA, 20 bp, Homo sapiens
caaggaagcatggaagaagg

SEQ ID NO: 151 - DNA, 20 bp, Homo sapiens
ccgagtcaaaggatatgtgc

SEQ ID NO: 152 - DNA, 360 bp, Homo sapiens
accactgcactccagcctgggcgaccagagcgagactccatctcaacaacaacaaaaaagaacgttgggctacagtaagacttggtaagagggaccaaggaagcatggaagaaggagctggttggttcccagagcaaccagagaaggcttcacagagatgaaattggagctggattctgatgggtaagtaggagtttgcctggtagaaaaaaaaatagagaagggcaggaaaagaaacagcccttttcaaaaaagaggagaccaaacattgcatgcacatatcctttgactcggcaattgcactggcaggaattctgctgttatcctcacacacatacggctccaggcatatgtctaagg

SEQ ID NO: 153 - DNA, 17 bp, Homo sapiens
gagcccttgtgtgaatg

SEQ ID NO: 154 - DNA, 20 bp, Homo sapiens
gggagtgtagattgatagcc

SEQ ID NO: 155 - DNA, 510 bp, Homo sapiens
  misc_feature 465, 478: n = A,T,C or G
tttttttttagttcatactgtttgaaaacttgtgtttctaacttaatgaatgactgtgggcttcttttcacgtcagttcatgtacacagattttcatgttacttttttaaactgttgcgtagtataccacataatagatacaccatatactatttaactcattagtggacattttggttatttccagtttttaaaaatgtgataaacatgattacaaatgaatatctctgctcacgtatctttgagcccttgtgtgaatggatctctgtaggatacatttctagggcatgaaataacctaaggtgatatttgtatatttaaaatgttgataggattttaggaagttgctctaaaaaaggaaaggctatcaatctacactccctccaaaagtttatggacaattcctatttcctcacatccttggccaggatgaggcacttgccttgtgtcccgaatttgttaggnttcgagggtgatnttattttgagtgtgttccttcatatggttcct

SEQ ID NO: 156 - DNA, 20 bp, Homo sapiens
ggattccaggtctggagttt

SEQ ID NO: 157 - DNA, 20 bp, Homo sapiens
gtttcttgaaaaaacggggt

SEQ ID NO: 158 - DNA, 983 bp, Homo sapiens
attttgttcatatttatcgggatgacaaatccatagaatatattcttttatgttaaattatgatcttcatattaatcttaaaattttgtgacgtgtctttttcctttttttccacagttttaatatattattcttcaacgacattttttgtaactttacacttttttggttattttattttaaaaaaatgaaaaattaatttaaaaaaatgcaaaaaactgttggattatttattttagaaattcccccctttgtgttggactgcaaattgagtttctttctctttaggcctttcacaactaggactgagaatgtatgtaaaagttctgtgacagtacagaaggaaaacaactttttatgtatagcttctaaaaggggaaaaaaaaaaaaaagagaaaccctttgacttccacgtgcccatctcaagacattccactcacagatttgaggttctggattccaggtctggagttttccaatgttaatgtaaacagaactggcacacacacattaagatgaatgtaattattattcctcttgctggtcactaccgtcgctttctatttctctttctttgtgtgaatttatttaaaagaaaaaaaactttttgtaacgactatttgcagtttaaaaatcaataaaccccgttttttcaagaaacattgatggtggagctggttttacttggttttggtttgactttgccagtaaggttctccccttgtataccttgcaagtcctggggagggggaggcggagagagagggctgtggctgtgggtggcggcatctctcatccctataagctaagcctatagctcccttccttgatgctggcagtttgctgcacttagaggggacggggtggaggttttctgcaaaggagcctgtacttcctgctgtattacttctgaaaagactgtgcagtgtgttagttgttggctgaatagcagcgggcccagccttgccgacacttgtgtggcc

SEQ ID NO: 159 - DNA, 21 bp, Homo sapiens
ttgactttgccagtaaggttc

SEQ ID NO: 160 - DNA, 20 bp, Homo sapiens
aggaagtacaggctcctttg

SEQ ID NO: 161 - DNA, 3922 bp, Homo sapiens
aagcttgctcttgcagccaaaagactaattgcaaaggcatcttctcagtgaagggggcggggtgggctagggctgagtggaaatggtgagagagattattgtagaaaatatctcttccgggaacttagggcaaagagttttattttcaggaatcacatccctgtctcccccaacctcagaccaggcccccaatctcctccccacaagaaaaagcaaaggcagtctgaaaacctgttgccaaaggaagggaacacttctgaaggaggaagttgagagtcttaggccaggtcttgaaggagggggtatcaattaagcagagactgattggaaggggacctaacgtgcctatgatagactcctttctgaggtttacctgtttttgtcgcgggcggtggcggggcgggtgcggtaatctagagaggtctgggttgtgtgagatattttgagttgaagaatctatttgactagtaaaaaagttgaactttaaagtggtagctttggggacagaggacatgggggttgcattgcaggagtcagcatggagcagggtgcttgtcacacagtttggatcttgtggtttcttacgcatggggccaaaataaacccaggtgaatggcctatgggagggagagagggaagggagcttgctagagccgaggtagagatgagttctttgagaaagagcgggcgtttgtgattgtgtagggggctgcccatagtggacatcctggtggatgtcctctgtccttaccatccttctcttctctctccagggtaacaagatgctcaactatagtgctcccagtgcagggggttgcctgctggacagaaaggcagtgggcacccctgctggtgggggcttccctcggaggcactcagtcaccctgcccagctccaagttccaccagaaccagctcctcagcagcctcaagggtgagccagcccccgctctgagctcgcgagacagccgcttccgagaccgctccttctcggaagggggcgagcggctgctgcccacccagaagcagcccgggggcggccaggtcaactccagccgctacaagacggagctgtgccgcccctttgaggaaaacggtgcctgtaagtacggggacaagtgccagttcgcacacggcatccacgagctccgcagcctgacccgccaccccaagtacaagacggagctgtgccgcaccttccacaccatcggcttttgcccctacgggccccgctgccacttcatccacaacgctgaagagcgccgtgccctggccggggcccgggacctctccgctgaccgtccccgcctccagcatagctttagctttgctgggtttcccagtgccgctgccaccgccgctgccaccgggctgctggacagccccacgtccatcaccccaccccctattctgagcgccgatgacctcctgggctcacctaccctgcccgatggcaccaataacccttttgccttctccagccaggagctggcaagcctctttgcccctagcatggggctgcccgggggtggctccccgaccaccttcctcttccggcccatgtccgagtcccctcacatgtttgactctccccccagccctcaggattctctctcggaccaggagggctacctgagcagctccagcagcagccacagtggctcagactccccgaccttggacaactcaagacgcctgcccatcttcagcagactttccatctcagatgactaagccagggtagggagggacctcctgcctactccagcccctaccctgcacccacatcccataccctcttctccctacccatcccattccccacaggccctacattaacaaggttaagctcaacccctttcccccagcacctcagaatgtgccctccctctccccctcataaccccacctaacataaggacaagtcaatttgtcagtagcttcttctggcttgaaaccccctccctggattttatagcccacttaccatgcataacagacaagtcccatattttgtcagtagatgcctttttttttcgcttaagccttaagtgccaaatcacaagagaaaaagcagtaacagtttacagaagcaacttagtgccttgtaatctaactttgtcactgtgactacattacctcttcagcgccagagggcacccgtgggcctcccggagcctctgcccatggcggggtggagacccggaaccagcagccccctccactggcgacacaactgcaccttccctcatttcagtctcccgcacacttattcctcctcccctcttcccggtggcacctctccacctgtaccgccccccaccccccccacccctgccccttggaagagttgttgccagaccagggttttgggggaaacctgtcttgacattcaaaacctttttcttcccgatctgaacccctgttgactaatcttgcctgggtttgtgtaggtctgcaggaaggaaggctgaaaaagcggacgaagattttgacttaagtggactttgtgatttaattttttcttttttttaagtggggaggaaggggaagctagatggactaggagagacttgattttggtgctaaagttccccagttcatatgtgacatctttttaaaaaaaataacaacaaaaaaaaaatgagagaaaagctaaaaaaaaaaaagtaaggggtgagcagttaatggtattcattccacatacaatatctgtgtaaaacgatttcctgtagaagtagctttaatggtttttgctctagaataccgtaggtctatccttagagcactcacgccatgctttcttccctgggttttaaacttcatataactttcagaaattggagagcaaaaattttgcttgtcactgcacatcaatataaaaaagcttatttaacttatcaaaacgtatttattgccaaactatgcttttttttgttaattttgttcatatttatcgggatgacaaatccatagaatatattcttttatgttaaattatgatcttcatattaatcttaaaattttgtgacgtgtctttttcctttttttccacagttttaatatattattcttcaacgacattttttgtaactttacacttttttggttattttattttaaaaaaatgaaaaattaatttaaaaaaatgcaaaaaactgttggattatttattttagaaattcccccctttgtgttggactgcaaattgagtttctttctctttaggcctttcacaactaggactgagaatgtatgtaaaagttctgtgacagtacagaaggaaaacaactttttatgtatagcttctaaaaggggaaaaaaaaaaaaaagagaaaccctttgacttccacgtgcccatctcaagacattccactcacagatttgaggttctggattccaggtctggagttttccaatgttaatgtaaacagaactggcacacacacattaagatgaatgtaattattattcctcttgctggtcactaccgtcgctttctatttctctttctttgtgtgaatttatttaaaagaaaaaaaactttttgtaacgactatttgcagtttaaaaatcaataaaccccgttttttcaagaaacattgatggtggagctggttttacttggttttggtttgactttgccagtaaggttctccccttgtataccttgcaagtcctggggagggggaggcggagagagagggctgtggctgtgggtggcggcatctctcatccctataagctaagcctatagctcccttccttgatgctggcagtttgctgcacttagaggggacggggtggaggttttctgcaaaggagcctgtacttcctgctgtattacttctgaaaagactgtgcagtgtgttagttgttggctgaatagcagcgggcccagccttgccgacacttgtgtggcc

SEQ ID NO: 162 - DNA, 24 bp, Homo sapiens
aaactttttctcttgtgatttggc

SEQ ID NO: 163 - DNA, 18 bp, Homo sapiens
cttgaaaccccctccctg

SEQ ID NO: 164 - DNA, 421 bp, Homo sapiens
  misc_feature 13, 361, 388, 395, 400, 411: n = A,T,C or G
ctgtaaactgaanaaaactttttctcttgtgatttggcacttaaggcttaagccggaaaaaaaaaggcatctactgacaaaatatgggacttgtctgttatgcatggtaagtgggctataaaatccagggagggggtttcaagccagaagaagctactgacaaattgacttgtccttatgttaggtggggttatgagggggagagggagggcacattctgaggtgctgggggaaaggggttgagcttaaccttgttaatgtagggcctgtggggaatgggatgggtagggagaagagggtatggggatgtggggtgcagggtaggggctggagtaggcaggaggtccctcccctcgtgccnaattctttggcctcgagggccaaattnccctatnagttnagtcctttttnaaattcctaa

SEQ ID NO: 165 - DNA, 18 bp, Homo sapiens
aatgtgccctccctctcc

SEQ ID NO: 166 - DNA, 24 bp, Homo sapiens
catggtaagtgggctataaaatcc

SEQ ID NO: 167 - DNA, 400 bp, Homo sapiens
  misc_feature 296, 297, 298, 299, 300, 301, 302, 303, 304: n = A,T,C or G
agccagggtagggagggacctcctgcctactccagcccctaccctgcacccacatcccataccctcttctccctacccatcccattccccacaggccctacattaacaaggttaagctcaacccctttcccccagcacctcagaatgtgccctccctctccccctcataaccccacctaacataaggacaagtcaatttgtcagtagcttcttctggcttgaaaccccctccctggattttatagcccacttaccatgcataacagacaagtcccatattttgtcagtagatgccnnnnnnnnncgcttaagccttaagtgccaaatcacaagagaaaaagcagtaacagtttacagaagcaacttagtgccttgtaatctaactttgtcactgtgacta

SEQ ID NO: 168 - DNA, 19 bp, Homo sapiens
accatcttcgacttgagcg

SEQ ID NO: 169 - DNA, 17 bp, Homo sapiens
atgtaatccccgccagc

SEQ ID NO: 170 - DNA, 973 bp, Homo sapiens
cccgggcgctaaggacgggcttcagctcccgctggcaaaaagagaaagtcgagcccgccttcctgcccaacaaaaaacaacaacatgacaacaagaaccccggagggagtggaatgagtgacgtcacagccgcgctctgaggctgacaaaggagggggcgcgccctcccgctctgcgcccgcgcggccccggagagggggcgcctgaagcgccgggtagggaagtcagccgacttgaaacttttcctcttaaagaaaaaaaaaaaaaaaagttgtgcgcggctcacagtggggttttttttttttccgccttcttttctcgtctccctcccccttcttccttttgaaagtttcttctcctccccctgccccccctccccgcctgaccgcatggctgattcaactccagtgtcaatcaacttctttttcctcctcttcctcatttaaataagtttaaagctcctcctccccccggcccaccaaatctgaactttataaattgggctttgcgcgccccagcccggagtcagaaaggcgaggggcgccgggaactggcgtgtgggactccagacaggagaggctgcgccttccccgcaccgggaccttcgcgacacaccagatcctcgcccctggctcgcgcgaacgcacaggatgaccaccaccctcgtgtctgccaccatcttcgacttgagcgaagttttatgcaaggtaaaggggggcggagcatttgcttttcaaaaagtctttttcttttgccttaagaaagaacccccaaaagtttgggtcttggaaggcaatggggaaagtggtgcagcgagatgattcttttctcctccggcatttctgccaagtttgaaggaatttggccccgtccttcccaccctttgagtttcaacagttgctggcggggattacatgtgaatctggaggccagggttttgaggggcgaagtttgcctggcagggcagcccggg

SEQ ID NO: 171 - DNA, 20 bp, Homo sapiens
acgaacctacgtgatcccag

SEQ ID NO: 172 - DNA, 20 bp, Homo sapiens
atttcccttatctggcgctt

SEQ ID NO: 173 - DNA, 383 bp, Homo sapiens
taaaactgcgtttcttatttattcgtaaacatctgggcaaacccagcgaaaccttccaaatcacaattgtttgagaaaccggctgtttttcaactttgtgaaacccaacttttgctgcagccacgaacctacgtgatcccagcggggtcggctttcatttgtctcctctgcccgaaatggatggcccccactttaactcggctgctgcccctcgcttgttctgctgctgccctccagccgtctgttgcttccctcccccgctcccatttttcagcttttcttgaaatctggcaagcgccagataagggaaataacttccatccacctttaattttaaatgcattcaagtggtaggtttctttctttagaggggatgtttggcg

SEQ ID NO: 174 - DNA, 20 bp, Homo sapiens
ccagcgaaaccttccaaatc

SEQ ID NO: 175 - DNA, 20 bp, Homo sapiens
atttcgggcagaggagacaa

SEQ ID NO: 176 - DNA, 383 bp, Homo sapiens
  misc_feature 1: n = A,T,C or G
naaaactgcgtttcttatttattcgtaaacatctgggcaaacccagcgaaaccttccaaatcacaattgtttgagaaaccggctgtttttcaactttgtgaaacccaacttttgctgcagccacgaacctacgtgatcccagcggggtcggctttcatttgtctcctctgcccgaaatggatggcccccactttaactcggctgctgcccctcgcttgttctgctgctgccctccagccgtctgttgcttccctcccccgctcccatttttcagcttttcttgaaatctggcaagcgccagataagggaaataacttccatccacctttaattttaaatgcattcaagtggtaggtttctttctttagaggggatgtttggcg

SEQ ID NO: 177 - DNA, 19 bp, Homo sapiens
tgtgaaacccaacttttgc

SEQ ID NO: 178 - DNA, 16 bp, Homo sapiens
tccatttcgggcagag

SEQ ID NO: 179 - DNA, 383 bp, Homo sapiens; identical to SEQ ID NO: 173

SEQ ID NO: 180 - DNA, 19 bp, Homo sapiens
ggaagctgaggctaggacc

SEQ ID NO: 181 - DNA, 20 bp, Homo sapiens
ccacagcccttcttttctcc

SEQ ID NO: 182 - DNA, 380 bp, Homo sapiens
  misc_feature 19, 21, 22, 26, 39: n = A,T,C or G
ggattacaggtgtgagccncnngccnggcctgtagtcanatttattgaatgcactacctgctaagcacaaagcactctactaggcactttatatatattatttcacttatttttcacaatgagacaggtattatctccattttacctataggaagctgaggctaggacccttgctcatcgactgtctcccagagagttagtgccaaagcaggagctgaaaatcaggtctgtctgattccaaaacccacactcttccattaacaaggagaaaagaagggctgtggtacatttgccaaagaaaaccacttttctagttgtccaagtgccaagggccacagtccacagtcagggtttcagaataaactgagagtccttgaatg

SEQ ID NO: 183 - DNA, 19 bp, Homo sapiens
acggaccttgacagaagcc

SEQ ID NO: 184 - DNA, 21 bp, Homo sapiens
cttctgtctctggaagatagc

SEQ ID NO: 185 - DNA, 311 bp, Homo sapiens
  misc_feature 6, 8, 16, 22, 26, 38, 44, 49, 56, 87, 114, 137, 153, 220,223, 228, 238: n = A,T,C or G
ccactncnctccagcntgggcnacanagagagactctntttcanaaaanaaaaaangaagaaaagaaaatggcttccctggcctcanataggctgagcagccttttagactcanacggaccttgacagaagccaganaccacaggcaaagctnagaccctcaagaacaagccacccaggggcagcagcacaggcaaaaggagcaggcagcagtgcctggncanaggcnacttccggantggggccgcctcatcaatcattgtaccctgctatcttccagagacagaagccccagaagcacacaaaccacca

SEQ ID NO: 186 - DNA, 21 bp, Homo sapiens
tcacccccaaaggccccatct

SEQ ID NO: 187 - DNA, 24 bp, Homo sapiens
gacaagcccaaattcagtgtgtca

SEQ ID NO: 188 - DNA, 409 bp, Homo sapiens
  misc_feature 23, 36, 58, 65, 119, 127, 130, 155, 159, 168, 189, 193, 207,218, 239, 283, 302, 304, 354, 368, 374, 376, 402: n = A,T,C or G
  misc_feature 405, 409: n = A,T,C or G
tccccaaaaaatatatgtgaaanttactgaaaaatnattaaaaggacatgaatcccancacttantcacccccaaaggccccatctccaaataccatcacactgggggttaggtttcancatatganttntgggggtacacaaacattcagtctnttgnagtaagggnccaaatagaggtgccaggggngtgncctaccctggaganttatccagganccacagacctgaggaccgacntgacacactgaatttgggcttgtcccccatcacttcacctaganggaaaggagatgacgccantntcgtgagagggatagatgcattgggccccagcacactgggatttggctgntgcgcctgctgtcncaggcntnttgatttgggaagtttctgaaccccnctnaccn

SEQ ID NO: 189 - DNA, 22 bp, Homo sapiens
cattcagtctattgcagtaagg

SEQ ID NO: 190 - DNA, 22 bp, Homo sapiens
atttcggtcctcaggtctgtgg

SEQ ID NO: 191 - DNA, 324 bp, Homo sapiens
  misc_feature 33: n = A,T,C or G
gccactgcactccagcctgggtgacagagtganatcctatccccaaaaaatatatgtgcaaattaatgaaaaataaataaaaggacatgaatcccatcacttaatcacccccaaaggccccatctccaaataccatcacactgggggttaggtttcaacatatgagttttgggggtacacaaacattcagtctattgcagtaagggcccaaatagaggtgccagaggagtgacctaccctggagaattatccaggacccacagacctgaggaccgaaatgacacactgaatttggccttgtcccccatcacttcacctagaagg

SEQ ID NO: 192 - DNA, 20 bp, Homo sapiens
tgctgatttccgtggtgtaa

SEQ ID NO: 193 - DNA, 19 bp, Homo sapiens
agggtggcaagggttacag

SEQ ID NO: 194 - DNA, 407 bp, Homo sapiens
  misc_feature 51, 107, 164, 165, 185, 262, 334, 387, 400: n = A,T,C or G
ggaaacatttaacaacttgcagaacggggaaaaaagccctggtttgcagtntgctgatttccgtggtgtaaatactgcccccatggctggtttccatctatgaagtngacgtcactgaccacagagttgaggagaagtgcatactgttggctctcacgaagtgnnttgggctggctgcagctggngtcactgctgtaacccttgccaccctctaatgtaattgtctgtctagtactctgtgtcccctctacaaggagacctnagcactgtcgcagtgtccactcatcatgggtactaatactcgtgggagccataagtaaaagccacaatggtnggttgggagagctgctgtcagggaagcatgtcctggggctaggggagaaggtnaagaggctgcatnggaggcc

SEQ ID NO: 195 - DNA, 21 bp, Homo sapiens
tgagctagcaaacacacatgc

SEQ ID NO: 196 - DNA, 23 bp, Homo sapiens
ccatctgctgtattcatttctcc

SEQ ID NO: 197 - DNA, 474 bp, Homo sapiens
  misc_feature 11, 77, 167, 168, 169, 170, 171, 172, 173, 174, 175, 193,292, 293, 294, 295, 296, 297, 298, 299, 300, 301, 302: n = A,T,C or G
  misc_feature 303, 304, 305, 306, 307, 308, 309, 310, 311, 312, 313, 314,315, 316, 317, 318, 319, 320, 321, 322, 323, 324, 325: n = A,T,C or G
  misc_feature 326, 327, 328, 329, 330, 331, 332, 333, 334, 335, 336, 337,338, 339, 340, 341, 342, 343, 344, 345, 346, 347, 348: n = A,T,C or G
  misc_feature 349, 350, 351, 352, 353, 354, 355, 356, 357, 358, 359, 360,361, 368, 446, 467: n = A,T,C or G
caaaagatttnaattttaatatcataaaatattttcatggacaagtgagctagcaaacacacatgcaccaatgtccnttttgacaagagtaccccctaccccgactcccacaccaaaatggacatgagattggagaaatgaatacagcagatggaacagatagaagnnnnnnnnntcagtaaaaaggatggantataactttgtgcttggttattttcctatgtcgcaacaaaacaagacatttcggtgcaaatagttaatctttcctctttttttccatttgtctggtggnnnnnnnnnnnnnnnnnnnnnnnnnnnnnnnnnnnnnnnnnnnnnnnnnnnnnnnnnnnnnnnnnnnnnngcagganaataattttgtaaactgtcacttcgcgggcagggagggatcgatgccacgtgggccccagctcacccggggtggaggnctggggagctggaaacccgancccgggc

SEQ ID NO: 198 - DNA, 19 bp, Homo sapiens
cgactcccacaccaaaatg

SEQ ID NO: 199 - DNA, 22 bp, Homo sapiens
tcttgttttgttgcgacatagg

SEQ ID NO: 200 - DNA, 250 bp, Homo sapiens
  misc_feature 11, 77, 167, 168, 169, 170, 171, 172, 173, 174, 175, 193: n = A,T,C or G
caaaagatttnaattttaatatcataaaatattttcatggacaagtgagctagcaaacacacatgcaccaatgtccnttttgacaagagtaccccctaccccgactcccacaccaaaatggacatgagattggagaaatgaatacagcagatggaacagatagaagnnnnnnnnntcagtaaaaaggatggantataactttgtgcttggttattttcctatgtcgcaacaaaacaagacatttcggtgc

SEQ ID NO: 201 - DNA, 23 bp, Homo sapiens
ttaggagcttcaagatccaggag

SEQ ID NO: 202 - DNA, 25 bp, Homo sapiens
tgtagtggctaattttgtagaggag

SEQ ID NO: 203 - DNA, 390 bp, Homo sapiens
ctacttggaagctgcttcttttaggagcttcaagatccaggagagctcatttgggggctctgacccacaaggtagtcgccctgcaccatgccctacctctgccagagtgccctgggaaccagtttgagggagggtagagctgccactgtcaagccaaaagttgggagaccaggcccctagctgggccctagttttcctcctctacaaaattagccactacaactaaatggtttgaggatccttccagctccaaagtgctatgatgcaaataacgttgttctttgtattttaaatcaagaactttagggacttcttttgtaggttccagccctttattcccccttattagacagacattccccagaaaattatattcccctcccctattgg

SEQ ID NO: 204 - DNA, 20 bp, Homo sapiens
gggaataaaggctgaaccta

SEQ ID NO: 205 - DNA, 22 bp, Homo sapiens
gccactacaactaaatggtttg

SEQ ID NO: 206 - DNA, 333 bp, Homo sapiens
  misc_feature 233, 263, 290, 299, 307, 322, 332: n = A,T,C or G
tgacagagtgagactccgtcttaaaaaaaaccttaaagaatcagttagcgaagcaaaagccaatagggagggaatataatttctggaatgtctgtctataagggaataaaggctgaacctacaaagaagtccctaaagttctgatttaaatacaagaacaacgttatttgcatcatagcactttggagctggaaggatcctcaaaccatttagttgtagtggctaatttggtngaggaggaaaactagggcccagctaggggnctggtcttcccaactttggggtttganagtggaagntctacccnccctcaaaactggtnccccaggggna

SEQ ID NO: 207 - DNA, 19 bp, Homo sapiens
gctgtggctcctctccttc

SEQ ID NO: 208 - DNA, 20 bp, Homo sapiens
ggatcttgagggaggaaagg

SEQ ID NO: 209 - DNA, 336 bp, Homo sapiens
  misc_feature 33, 38, 186, 238, 247, 256, 269, 296, 322: n = A,T,C or G
ccttgcaaagcagctgaggaggtgggccaaggntcctnttcccccaggaggttagctggcgaagggctggcccctgctgtggctcctctccttcagcagatgggcccttccagtgggcagaggcctcagcctcaagcttcaggtgacggggcagtgtgtatggggtgggggtggggcggggcacgntgcagggaagcgggtaggcatcttctcctttcctccctcaagatcctttttngcagcttgntatccaccngcccgaaacaaanggcctgccaccaccatgagttgcacancagctcctgccccagtgatattaaanctcttctggtcact

SEQ ID NO: 210 - DNA, 20 bp, Homo sapiens
gctgtgttgcttggtagcaa

SEQ ID NO: 211 - DNA, 18 bp, Homo sapiens
aaaatgcccctcccagag

SEQ ID NO: 212 - DNA, 409 bp, Homo sapiens
  misc_feature 300, 315, 399, 408: n = A,T,C or G
gtagtactacctccccacaatgtggactgcaaaatgctggctggctgtgttgcttggtagcaaaaggggttgcatgctgctcagctctctgtttctctccaacccaagcatttggatgtgggactgtgccccgcctggtgtctggggctctgggaggggcatttttacttccctgtttacaagaagggttacatcctattccaagtccaaagtggacacttgttcctttgctcagcatcccatgcagactcagcaggttacccgctcccctgggagggtggctgtggccaagcactgctnccatgggacttacancccggctggtcaatggaacaagcatacagtttttgccctcaacttttggggaaaggggctaagatgttagaagtataccaatcnttaatgggna

SEQ ID NO: 213 - DNA, 20 bp, Homo sapiens
gggcctccagatgaagtgtc

SEQ ID NO: 214 - DNA, 20 bp, Homo sapiens
ccacacctggggttcatttt

SEQ ID NO: 215 - DNA, 376 bp, Homo sapiens
  misc_feature 116: n = A,T,C or G
aaaaattgttcctcagctaagttgctttgactggaagattttgccttctctgggcctccagatgaagtgtcctggagatcctttttcttaaatcttagcttcaagtcccagctccnctttactaatccttctcgtcaacctagtccactctgatgcaagcagacctgtaacagctcccctggcagcctccatgccacactcaattctgctcccccatcatcagcctccctctatttctgagcttcctggtccccatatacactgtggcctccacatctaccctatgaagctcccacagggaaaaagagggaagcagccagagggtttcttgacctagagcgtccaaaatgaaccccaggtgtggagtcagtaggag

SEQ ID NO: 216 - DNA, 20 bp, Homo sapiens
aaatccccaaaacaccacaa

SEQ ID NO: 217 - DNA, 21 bp, Homo sapiens
gtgtttcaattgctagccctg

SEQ ID NO: 218 - DNA, 20 bp, Homo sapiens
aagttcagtcactggtttgc

SEQ ID NO: 219 - DNA, 20 bp, Homo sapiens
gttgggtggatctctcttcc

SEQ ID NO: 220 - DNA, 362 bp, Homo sapiens
  misc_feature 18, 82: n = A,T,C or G
gattacaggtgtgagccncgcgcctggcaaaatttactaatttttacatcatcaggtagctataaatgtggcagcttcaccnatgctcatgaagattgatgattattactctttgacatttttgcttctttattcaagttcagtcactggtttgctctgatattagataagttactttagcctcggtaggtttcagttttttgtcatacaggaagagagatccacccaacctctcaatttcctagtagaattgctcacagaattaaacaaaatagtaaacagaaaggcactctgcagatttttgaatgcaataggatagaatagaggaaagagaattgggagggaattgtcatctggaatgg

SEQ ID NO: 221 - DNA, 19 bp, Homo sapiens
tgggtgacagtgagactcc

SEQ ID NO: 222 - DNA, 20 bp, Homo sapiens
cgttgtgacgttgagttagg

SEQ ID NO: 223 - DNA, 291 bp, Homo sapiens
  misc_feature 170: n = A,T,C or G
actgcactccagcctgggtgacagtgagactccctttaaaaacaaaacaaaacaaaacaaaaacaagctcctttgaaggcaggcgttcccatttgaatgtaaaggttgtatattgttcctaactcaacgtcacaacgctcagtaaaaatagaggtgaagagaccaaaaanataagatagcagaccatattcattcatgctctacaaactaataaatgtgctgtctaaaaaagctgcatataaaaacccttaggattttgtatctgtttaacacagaaattcaacttctggg

SEQ ID NO: 224 - DNA, 20 bp, Homo sapiens
ttcctgcaacagatatcccc

SEQ ID NO: 225 - DNA, 20 bp, Homo sapiens
ccccgttctctattttctgc

SEQ ID NO: 226 - DNA, 333 bp, Homo sapiens
accattgcactccagcctgggcaacagagtgagaccctgtcaatcaaccaatcaatagaaaaagaaaaaactttcccagaattcctgcaacagatatcccctttgttttcattgagcaaagacaggtcacccttagctgcaagggagcctgagaaagtgcatttttggctttttcactttctatagtaggaagcagaaaatagagaacggggttagaaatgactgttagatagccagtcatcagtatgtgccataaaatgcacatgagatataaatgcttatgtggcaaactcgataaattaaattattaagtaattagctggctagggtttt

SEQ ID NO: 227 - DNA, 20 bp, Homo sapiens
ttcctcatttacaaagtggg

SEQ ID NO: 228 - DNA, 20 bp, Homo sapiens
cctggaaacagaatttgaac

SEQ ID NO: 229 - DNA, 334 bp, Homo sapiens
  misc_feature 92, 152, 188, 316, 325: n = A,T,C or G
agctcaggccttgggtaagttacttacgatcactcagactcaatttcctcatttacaaagtgggggatggtacccacctagcagttaatgantagcattaaactaaagagggtgtccgacacaataggcatttaatatatattattattatngtccttaatgggttatccttctaatatgtccaaggngatattacaacacacacacacacacacacacacacacacaaatcagtgttcaaattctgtttccaggccaggcgcggtgcctcacacctataattccagcactttgggaggcggccaaagcgggcggntcacctgangtcaggagt

SEQ ID NO: 230 - DNA, 21 bp, Homo sapiens
acaacagcatggatgaatctg

SEQ ID NO: 231 - DNA, 20 bp, Homo sapiens
tgtgccccatctcagttaat

SEQ ID NO: 232 - DNA, 238 bp, Homo sapiens
  misc_feature 228: n = A,T,C or G
atctggtatatccatacaagagagtactattcagcaataaaagggaatgaacacaacagcatggatgaatctgaaaaatatgctgagagaaagaacacaggtacaaaagcatgcatactacatgattccaatgatttgaaactatagaaaaaacaagtctgatctagaaggaaggaaagtgatcagtggttgcttggacagaaggagattaactgagatggggcacangggaacattt

SEQ ID NO: 233 - DNA, 20 bp, Homo sapiens
taaggcactgtgagaaaggc

SEQ ID NO: 234 - DNA, 20 bp, Homo sapiens
catgcccaaagtcatgcagc

SEQ ID NO: 235 - DNA, 324 bp, Homo sapiens
  misc_feature 60, 64, 68, 72, 76, 80, 299, 313: n = A,T,C or G
tgcactccagcctgggcgacagagtaagacttcatcccaaaaaaaaaaaaaaaaaggaangaangaangaangaangaantttaagtattgcagaggttaaggcactgtgagaaaggcaggtaagagagcagtttctagaatcataattcctgtttcaaattccagctctctcattggctgcatgactttgggcatgtcacttaaacccctggagcctcagtttcttcatctgtgtaattgaccaaagccagtatctacacagagatttgctgaaattaatgagtgcacgttcataaanttcgtagcgctganctaagtgcaca

SEQ ID NO: 236 - DNA, 20 bp, Homo sapiens
gctgttatgatggcagatcc

SEQ ID NO: 237 - DNA, 19 bp, Homo sapiens
ggagaggatagccaaagcc

SEQ ID NO: 238 - DNA, 380 bp, Homo sapiens
gccattgcactccagcctgggtgacagagcgagactccatctcaataaataaataaataaataataattaggaaaccttgctgttatgatggcagatcctcaatcccaaaggcactgctaacctatgcaggttatggatgtcctttctgggcacagaccctacggcatcctaggtcccttttcaagacgggaacttgaagtcagatgggaacctctggaaggctttggctatcctctccagcagtttaattacaactattttgttgttgttgttgtttattgtgcacttagttcagcgctacgaattttatgaacgtgcactcattaatttcagcaaatcctttgtgtagatactggctttgttcaattacacagatgaa

SEQ ID NO: 239 - DNA, 20 bp, Homo sapiens
tatgccaagacaaagaagcc

SEQ ID NO: 240 - DNA, 20 bp, Homo sapiens
ctgaactcctcctcttaccc

SEQ ID NO: 241 - DNA, 366 bp, Homo sapiens
gccattgcactccagcctggcaacagagcaagactctgtctcaaaaaaaaaaagaaaagaaaaagaaaacattatgccaagacaaagaagccagtcacaaaaggacacatatgattccattcatatgaaatgtccagaataggcaaatctatagagacagaaagtagactagctttgccaagggtaagaggaggagttcagggggaacttgggagtgactactaatatagggggttctcttttggggtgatgaaaatgttttcaatttagattgtagcatcattgtaacaactacttagtaaataaattaaaaaccattgaattgtacactttagatgagtaaattttatggtatataaattataa

SEQ ID NO: 242 - DNA, 23 bp, Homo sapiens
ctaagggcaaaactgctctgtgt

SEQ ID NO: 243 - DNA, 21 bp, Homo sapiens
accccaactttgcaacaacct

SEQ ID NO: 244 - DNA, 411 bp, Homo sapiens
tggtgccaggtctccactttcctcaagctccagcgttcccaccttcaatgtttagaataacaggaaactctaagatgatctatgggtaactaagggcaaaactgctctgtgtgtgtctgcagtccatagaggccacactgtggcccacaggaacagtgcctcctcacctgtgtgccactatcctgcaagctccatccattggagcagccagtccaggaaagggagtttcttgagccctgcagttctccttcccttcattcactccctgctgcccatgctgaggacgctccgggctctcctggcaggcttgcatcctcccctgcccaaacgccctctttcccctcctcccctcaggccaactagccccaaacagcaggcgcaggagcccaggttgttgcaaagttggggtgg

SEQ ID NO: 245 - DNA, 23 bp, Homo sapiens
gctggactgattctaatgctggt

SEQ ID NO: 246 - DNA, 23 bp, Homo sapiens
gaagtgcagagtccttgatccat

SEQ ID NO: 247 - DNA, 25 bp, Homo sapiens
caagagaagagttaaccgttactgg

SEQ ID NO: 248 - DNA, 25 bp, Homo sapiens
tgcttgatttaataagctgagagtc

SEQ ID NO: 249 - DNA, 431 bp, Homo sapiens
  misc_feature 1, 10, 13, 16, 72, 198, 201, 253, 281, 289, 302, 366, 380,404, 419: n = A,T,C or G
ngaagtggantanccntgtttatttgcatatacacaagagaagagttaaccgttactgggtgagaaggaggnaaggcttcagcagaggaaggcaccttgacagacaaacaagagactctcagcttattaaatcaagcatagtcacaaacttcacttgccccaagccaacaacttaactcatttacctgctgtcctagngantcattaacaaaaccagctggaaaatagagagaaatgattttacatatctggncctgccacttaaaactttatgtacagantgcagggnaaaaaacataagngggcacttccaaatagttcttgatctaatcaggtgccatctgtcctggctattaaaaatatctnttttggggaggaanttgggggttttaaatgtggccctncaagttggggggccnccatttcttaaa

SEQ ID NO: 250 - DNA, 19 bp, Homo sapiens
aacttcacttgccccaagc

SEQ ID NO: 251 - DNA, 22 bp, Homo sapiens
caagaactatttggaagtgccc

SEQ ID NO: 252 - DNA, 431 bp, Homo sapiens; identical to SEQ ID NO: 249
  misc_feature 1, 10, 13, 16, 72, 198, 201, 253, 281, 289, 302, 366, 380,404, 419: n = A,T,C or G

SEQ ID NO: 253 - DNA, 21 bp, Homo sapiens
cttgggcttataaaaccagca

SEQ ID NO: 254 - DNA, 20 bp, Homo sapiens
tagcatgggggtgtgtacaa

SEQ ID NO: 255 - DNA, 319 bp, Homo sapiens
  misc_feature 290, 316: n = A,T,C or G
gtatataaaggattaaaaaattccaatttaatacattttgggaaaagcaaatgtaaaatgacttgggcttataaaaccagcatttacaattatctgtgaatagtcaaagacaaatcatagaaccaatctgattacaaatccaaagtaattctaatgttggttacagaatcactttcccactcccccagtaaaagtccaggtgttaagttgtacacacccccatgctacacacactccttcatctccttctcagtgttttcatacagtacatgttgcagcactgctcaatnttgcaaacagtgaaatttatcaggantct

SEQ ID NO: 256 - DNA, 20 bp, Homo sapiens
ccaattcaattcgttgcctt

SEQ ID NO: 257 - DNA, 18 bp, Homo sapiens
gttgcgggtctgaaatgg

SEQ ID NO: 258 - DNA, 250 bp, Homo sapiens
  misc_feature 127: n = A,T,C or G
taaggctaaatttgtaggtttttgttttcctttgtatttatcatgtttttaatttcttctctgaggaggaattctctgaatctgtatcttccaattcaattcgttgccttttgaggcactgtggcantgaacagccctgctactatctgtggctggggtgtcagtggggtcctctcttgttccagcattgggggtctcacaggccatttcagacccgcaacaatctttgtgtaggagtgtccctgtcagg

SEQ ID NO: 259 - DNA, 20 bp, Homo sapiens
ccaattcaattcgttgcctt

SEQ ID NO: 260 - DNA, 23 bp, Homo sapiens
agtctgatgacagtgaggagagg

SEQ ID NO: 261 - DNA, 556 bp, Homo sapiens
  misc_feature 127, 342, 443, 464, 490, 503, 526, 531: n = A,T,C or G
taaggctaaatttgtaggtttttgttttcctttgtatttatcatgtttttaatttcttctctgaggaggaattctctgaatctgtatcttccaattcaattcgttgccttttgaggcactgtggcantgaacagccctgctactatctgtggctggggtgtcagtggggtcctctcttgttccagcattgggggtctcacaggccatttcagacccgcaacaatctttgtgtaggagtgtccctgtcagggcgagttatcacggtcagtgtctgagtgtcctgggggaagagtaggccaccacctccagctcccccaagttctgcccgttattgtgagggtnagggggacgagggtgtaagcgtccattgttgtgggttgggcacagatggtttcgaggctcctctcctcactgtcatcagactggggtcctggggacagttnccagacccgctgttgagagtngagccagatgccttgggggacaggangagaaggcggctnctcaagcccgacttgctcagggnctttncattgaagctcttgggtttcaaaaa

SEQ ID NO: 262 - DNA, 23 bp, Homo sapiens
gactagaatcagttgagcgaaaa

SEQ ID NO: 263 - DNA, 20 bp, Homo sapiens
ggttgtctttgtggctggtt

SEQ ID NO: 264 - DNA, 241 bp, Homo sapiens
  misc_feature 201, 211, 213, 214, 238: n = A,T,C or G
gactagaatcagttgagcgaaaaatttataaagcttacaagtggctccgctactcttatatctcctactcaaataacaaagatggagagacctccttggtgaccggggaggcagatgaagggagagcaggaaccagccacaaagacaacccagccccttcttccagtaaggaagcctgtctaaacatagcaatggcacatnaaaccagggncnngaaaaaaaaaaaaaaaaaaaaagntct

SEQ ID NO: 265 - DNA, 22 bp, Homo sapiens
ataaagcttacaagtggctccg

SEQ ID NO: 266 - DNA, 20 bp, Homo sapiens
ggttgtctttgtggctggtt

SEQ ID NO: 267 - DNA, 241 bp, Homo sapiens; identical to SEQ ID NO: 264
  misc_feature 201, 211, 213, 214, 238: n = A,T,C or G

SEQ ID NO: 268 - DNA, 20 bp, Homo sapiens
cactcactaatcatgagacc

SEQ ID NO: 269 - DNA, 20 bp, Homo sapiens
atcagccctattctgaatgc

SEQ ID NO: 270 - DNA, 355 bp, Homo sapiens
  misc_feature 2, 6, 69, 147, 233, 245, 258: n = A,T,C or G
ancatnggcactccagcctggggcaacagagagagactgtctcaaaaaaaaaaaaaagtaggggggaancaacacaaaacaaaactgtggccatcaagaaaaacactaaatgatcattgacaaatcaattcactagctttatttttnttctttttcagcagaacactcactaatcatgagacctgcaataaaatctttaacatttctatgacctaactttttaacctacagantagggataatancatcatagagtanctgtaagcataagagtacatctgtaaaagcattcagaatagggctgatcacttaataagcccccaataaatgtttgttaatatttctatcctcatgg

SEQ ID NO: 271 - DNA, 23 bp, Homo sapiens
aaagactggaccatgtgaaccat

SEQ ID NO: 272 - DNA, 23 bp, Homo sapiens
tttccttcataagcagggtgaaa

SEQ ID NO: 273 - DNA, 553 bp, Homo sapiens
atacacaagtttacttttaaaaataaagactggaccatgtgaaccattgagcctacagtgcctgaagaatgaagtctaaatcccaatctatctgtctggcctgacctcccttccctgagttatacactgtagcccaccaaactatttgtcattttaagaatgcactgcatggtactattttgcccttgtgccttttgttcatggtgttcttccaccttaattgtccagtccccaccaattcccctaagcctttcattggtaagagttttgagttatttgagtttctcttcaaaggtctccttctccatgtactttcaccctgcttatgaaggaaataattgaccccatagctagatcatattgctgcaaggcaaaccctcttgttgctgttagttgtttgtccagttggactgttctcaagtccaattggagttctcaaggacagagtagaatcttattctttttatatacccaagacctagcactgtacctgatacctagaaggcattagtatgggtttactgatttcattggtttgtacctacagtagaat

SEQ ID NO: 274 - DNA, 18 bp, Homo sapiens
tgcctgcctgggactttt

SEQ ID NO: 275 - DNA, 25 bp, Homo sapiens
agtgtgcattcctagaagtgttagg

SEQ ID NO: 276 - DNA, 446 bp, Homo sapiens
  misc_feature 11, 25, 366, 432: n = A,T,C or G
ttttttttagntttgtacataagancactgcctgcctgggacttttgcaaaattccttgtatacacaaaattaacaacataataaagctttcttgtctcttctttggcaattctaaaaagactgaatcagtgaaggccctaacacttctaggaatgcacactacacccagccacccaccagcagatgtaaacagagatgtcaaccctgaggactaaatcaggggctagctgccaaacactcaaacttcacttgtttcttgccagtacagtaaggcccctttggcccatgatttcactttctagtttcagttaccattaggtcaaccgggggtccgaaaatatttacaggtcagggtattttgaggngacaggggaccacatttcacataacttttatttacggtattattattataattggttcctactttntttactattggttg

SEQ ID NO: 277 - DNA, 20 bp, Homo sapiens
caaaaccccagtctcttagc

SEQ ID NO: 278 - DNA, 20 bp, Homo sapiens
aaagtggcagctgaaagacc

SEQ ID NO: 279 - DNA, 311 bp, Homo sapiens
cacgttgtgcacatgtaccctagaacttaaagtataataataaaagaaaaagaaaaaaaaaggtcccagtttaaaggataagttatatggtcacctgcttataattattgcactgtctggtatgcaagtaaaaccaaaaccccagtctcttagctcctcacattcactatgggatgcctctagtagaaaagcctttaagcatccattctccttacttcaggtctttcagctgccacttttttttttttttttttttttttttaaatttgagatggagtctcgctctgtggcccaggctggagtgcagtggc

SEQ ID NO: 280 - DNA, 19 bp, Homo sapiens
gactggccagtaaagaggc

SEQ ID NO: 281 - DNA, 21 bp, Homo sapiens
gtagaatgtatgtggagtagg

SEQ ID NO: 282 - DNA, 320 bp, Homo sapiens
  misc_feature 24, 31, 44: n = A,T,C or G
gccactgcactccagcctgggtgncagaggngatcttgtctcanaaaaagttaaaatggacaattttacttcatgtatattttactacaatttttttaaattgcagactggccagtaaagaggccacattttgaattgtgctatattagagtccaggctctctaaatatatcaactctgttggggttggtatatttacaacccctacaaactagctcttccctactccacatacattctacccctctctccacttttcatttagttactaaagctagaaacctgtgaaatgtcctagactcttgcttctccctcatgtcg

SEQ ID NO: 283 - DNA, 19 bp, Homo sapiens
aaggcatcagggatccagg

SEQ ID NO: 284 - DNA, 20 bp, Homo sapiens
cagttctctgccatcacagg

SEQ ID NO: 285 - DNA, 275 bp, Homo sapiens
  misc_feature 18, 204, 257: n = A,T,C or G
cactgactccagcctggnaacagaatgagactccatctcaaaaaaaaaaaaaagttcaaagttcagaggtaggttgctcagggttaggtatggaaactacagaaggcatcagggatccaggctacatctacctctccactccgtcttcctaagcacctggatttcattttaaattgccacctgtgatggcagagaactgttggngattcagctatcaggtctttagtataagcaaggatgaaggggaagggcaattncaaaaggcaaaagaggcc

SEQ ID NO: 286 - DNA, 20 bp, Homo sapiens
gacctgatagctgaatctcc

SEQ ID NO: 287 - DNA, 21 bp, Homo sapiens
ctacatctacctcttccatcc

SEQ ID NO: 288 - DNA, 304 bp, Homo sapiens
  misc_feature 108, 229: n = A,T,C or G
ccactgcactccagcctggtagacagagattctgtctcataaataatgaggggagagacaactcccacaaggcctcttttgccttttgtcattgcccttccccttctntccttgcttatactaagacctgatagctgaatctccaacagttctctgccatcacagtggcaatttaaaatgaaatccaggtgcttaggaagacggatggaagaggtagatgtagcctggntccctgatgccttctgtagtttccatactaaccctgagcaacctacctctgaactttgaactttatttttttttg

SEQ ID NO: 289 - DNA, 20 bp, Homo sapiens
gttctctgccatcacagtgg

SEQ ID NO: 290 - DNA, 20 bp, Homo sapiens
gttgctcagggttagtatgg

SEQ ID NO: 291 - DNA, 129 bp, Homo sapiens
  misc_feature 82: n = A,T,C or G
cagttctctgccatcacagtggcaatttaaaatgaaatccaggtgcttaggaagacggatggagaggtagatgtagcctggntccctgatgccttctgtagtttccatactaaccctgagcaacctacc

SEQ ID NO: 292 - DNA, 20 bp, Homo sapiens
agagacaactcccacaaggc

SEQ ID NO: 293 - DNA, 20 bp, Homo sapiens
aactacagaaggcatcaggg

SEQ ID NO: 294 - DNA, 304 bp, Homo sapiens; identical to SEQ ID NO: 288
  misc_feature 108, 229: n = A,T,C or G

SEQ ID NO: 295 - DNA, 23 bp, Homo sapiens
aaggagtctggggtggaaataat

SEQ ID NO: 296 - DNA, 23 bp, Homo sapiens
cagaggcaaccactttcatttct

SEQ ID NO: 297 - DNA, 541 bp, Homo sapiens
  misc_feature 531: n = A,T,C or G
ggctgatggtaaatgcaaattccaggatgagagttgggcagcaggcctagagtgcactccgtcctgggaggagccagatgatagagggctctaggagagaaggctccaagggaaaatgaaacaagtaagtgacctgacgtgtgtctgaaccagcccagaggagatccatagttctgataaggagtctggggtggaaataataggtacatggaacactatgcaaacaaaatactaattattaatcctgggaaataaaagtaactgcagtttactatgtgactcagctataaataatataaatactgtatattaacctgataaaaatgatgatttacctaaattgggaggatggggaagagaagtatttgtccggggacaggggagctgcaagagtactaaaccgtatctcccacagtatgatgtcaaaagataatataaataaataagaaagaataacgcatgcatgtaatttagaagtataatgataattaccagaaagaaatgaaagtggttgcctctgaggagaagaangaagaaggat

SEQ ID NO: 298 - DNA, 19 bp, Homo sapiens
agacactttgtttttcatg

SEQ ID NO: 299 - DNA, 18 bp, Homo sapiens
aaagcagctatcaagaca

SEQ ID NO: 300 - DNA, 332 bp, Homo sapiens
  misc_feature 122, 170, 316: n = A,T,C or G
tgaagctgtctgtgaggccatcctgcgcttgtttccctcagacactttgtttttcatgttttggcagaatctccaatgaaaactatgttcctcacgggctgaaggtggtgcagtgtcacagncagggtggcctgcgctccctcatgcagctggagagccgctggcgtcanacttcctggactccatgcagcccaagcacctgccccagcagtggtcagtggaccacaaccatcagaagctgctccggaaattcggggaagatcttcccatccagctgtcttgatagctgctttcctcccagttaggacaagtgggnagctggagccaaggtt

SEQ ID NO: 301 - DNA, 20 bp, Homo sapiens
tttttcctctgcacagggac

SEQ ID NO: 302 - DNA, 21 bp, Homo sapiens
ttgaagagtcacctcttccca

SEQ ID NO: 303 - DNA, 414 bp, Homo sapiens
  misc_feature 75, 105, 210, 332, 333, 360, 374, 410: n = A,T,C or G
ttttttttaagtcttgacaagtcacttctgggagaattcttcatttttcctctgcacagggacagcatgaagaanggagatgtaaaaataaaaggcgaaggctcntcttgtccacaaaaatgagaggaaaaaagaccctgcccgtttaaaatccaaaaccataaactctccttcaaacaatatctttgctccagcagaagcatcctgggnttagtctaggttagtattctgagttgtgtcacacaggctttgacaattaatgatgtactaaaatgggaagaggtgactcttcaaccttggctccagcttcccacttgtcctaactgggaggnnagcagctatcaagacagctggatgggnagatcttccccgantttccggagcagcttctgatggttgtgggtccactnacca

SEQ ID NO: 304 - DNA, 24 bp, Homo sapiens
aagtcttgacaagtcacttctggg

SEQ ID NO: 305 - DNA, 21 bp, Homo sapiens
tggttttggattttaaacggg

SEQ ID NO: 306 - DNA, 414 bp, Homo sapiens; identical to SEQ ID NO: 303
  misc_feature 75, 105, 210, 332, 333, 360, 374, 410: n = A,T,C or G

SEQ ID NO: 307 - DNA, 23 bp, Homo sapiens
cttgtgcttacaagtagttttat

SEQ ID NO: 308 - DNA, 18 bp, Homo sapiens
cttctctgtctcctctga

SEQ ID NO: 309 - DNA, 302 bp, Homo sapiens
ccttgtgcttacaagtagttttattattaattttagagtaaacatcaccaacttgggcacaattccaaaatagagctcttgttggattctggtcataaaattcttttttaagcttgttaagatcttataaaataagaaagttttcccaatactttagaaaaattactaatcattaataagtcgattttatactcaaagtaatggcctaacattttgaaagatgaaacaacgctcctcttttgaacatctaatgtattaagtaagctcagtgtcccaggcttcagaggagacagagaagtcct

SEQ ID NO: 310 - DNA, 20 bp, Homo sapiens
acttgtcttcaggcaggcat

SEQ ID NO: 311 - DNA, 20 bp, Homo sapiens
ctcccctgtctatttccacg

SEQ ID NO: 312 - DNA, 175 bp, Homo sapiens
  misc_feature 90, 137: n = A,T,C or G
acttgtcttcaggcaggcatttctgggatctaaactagaaatccttgaaaacaaatagtaccagccactttgaggaatgtgcattcactntagtgggttattatggggtctctgcctcctggctgtgttatgcgganccaggagtggaggagagccgtggaaatagacaggggag

SEQ ID NO: 313 - DNA, 22 bp, Homo sapiens
gcctgctaaagttcaaagcaga

SEQ ID NO: 314 - DNA, 24 bp, Homo sapiens
cgtcacacaagatttctcatcctt

SEQ ID NO: 315 - DNA, 206 bp, Homo sapiens
agattcttctgtaatgagcattgttacttttatatcagaaaaatagacatttgccataaaataagtctaccctcaaatctctgatttaagacgacaattgtcagtcttaggaaaagcctgctaaagttcaaagcagactcaaagaaaaaagattcaaatctacacagtgactctctcctgaaaaggatgagaaatcttgtgtgacg

SEQ ID NO: 316 - DNA, 23 bp, Homo sapiens
ccaaaaaacattgactacaaggg

SEQ ID NO: 317 - DNA, 19 bp, Homo sapiens
acagtgtcacagcaagggc

SEQ ID NO: 318 - DNA, 335 bp, Homo sapiens
  misc_feature 156, 217: n = A,T,C or G
aaaatttaaaattttatttttttaccttttttttacatttttattttaaaataaacagtgtttccaaaaaacattgactacaagggggaaatgaggcaataaggttggaagaagggaaggactcaagaagaaatgctgaacctgcaaacacaatgntcagggagcatgcagagaggcccttgctgtgacactgtcctctcactgctactcctatgangcccagtgactatgctgggacactggagctaaagggtcaaagagaagcatttcattcctaaaaggtgatgtcaatttgtacttagccccagcaatgtgaatccccctcttcacagtcc

SEQ ID NO: 319 - DNA, 19 bp, Homo sapiens
ggggattcacattgctggg

SEQ ID NO: 320 - DNA, 21 bp, Homo sapiens
gactacaagggggaaatgagg

SEQ ID NO: 321 - DNA, 21 bp, Homo sapiens
cagaagcagattctaagtagc

SEQ ID NO: 322 - DNA, 19 bp, Homo sapiens
agcctgttgcctttctccc

SEQ ID NO: 323 - DNA, 284 bp, Homo sapiens
gccattgcactccagcctggatgacatgagcaaaactctgtctcaaaaaaaaagaaaacaaaaaaaaagcagcagcagcagaagcagattctaagtagccatttcaactcaggaattttctgaacccaaacatcatgcttataataatgctgcctgtaaactcggcagcttttgaagcttatgctgggagaaaggcaacaggctacccatccagcaagagagaaaaattcaagaataacaaatagcaaaaagcaaatgctttgagttcaggctggagtgcagtg

SEQ ID NO: 324 - DNA, 19 bp, Homo sapiens
tgcctgctgtgggaatagg

SEQ ID NO: 325 - DNA, 20 bp, Homo sapiens
tatcagcatgacctcactgc

SEQ ID NO: 326 - DNA, 397 bp, Homo sapiens
caccactgcactccagcctggggagttctttatagcagcatgagaatggactaacacagggactataaaagtgcctgctgtgggaataggattgtcagggggatcaaatgagattacacctctaaaatgtgtagtgtcatgtgtggttttctcatcattactgttgtcattattgttatcatcttccaggagcagtgaggtcatgctgatagcccatcacacacggaagcaggatggctcccatttaagaaagatcctttaatttttatgccacactgtcaattttgtacctgcacaatgtaccatcgtctacatttccattgtaggcaccattgtagctggggctgtggcagtcgcatggagaaagggcctgtttgaccctcagagaaagagggtc

SEQ ID NO: 327 - DNA, 20 bp, Homo sapiens
tgcatacacctgtgtagtcc

SEQ ID NO: 328 - DNA, 20 bp, Homo sapiens
gcagaatcctgtaagaaggg

SEQ ID NO: 329 - DNA, 371 bp, Homo sapiens
gccattgcactccagcctgggctacaatagcgagacttcatctcaaaaaaaaaaaagtgcctttggatgaattttggtaagtgcatacacctgtgtagtccaaatccctaccaagaaatagagcagtaatatcattccagaaagttccctcatctatcccttcttacaggattctgcccttgtcccgcgtgccctaccctttgttgtcctaccctatgagttctgcgccctgtggttctgagcacctggccacagtgagttgcccaggctgggaccctcacccaaaggcaagccagccaggtgctggtttaaagagtgatctttaacctctttggcctggcttggcagggtaggccacacctaccagaggc

SEQ ID NO: 330 - DNA, 19 bp, Homo sapiens
gcccagcctagagtgcagt

SEQ ID NO: 331 - DNA, 20 bp, Homo sapiens
taaaccgacatgcccagctg

SEQ ID NO: 332 - DNA, 342 bp, Homo sapiens
  misc_feature 84, 223, 282, 290: n = A,T,C or G
ccaattcaacacattagaactcagcaagcctttgattgccagctgggcatgtcggtttataacacttttcagaagagagagccnaaaacagagtagtggccgatatggcacattattggcactgtgggtcaaatttagaaacacattacctgtggtttgtgactagtaattaatcggttaggttatactctcacaataatgtccaccaataggacagagcatnacaaaggcagatttttttgaatcagattaaatgtaaggaaaagggagaggggaaggagnacttgggnaaaatcagcctgcctcttgtgtgactttctttgaggctctgctgtggttcga

SEQ ID NO: 333 - DNA, 20 bp, Homo sapiens
cagagcctgatctgaccaca

SEQ ID NO: 334 - DNA, 19 bp, Homo sapiens
ctggggaaaaagtccatgg

SEQ ID NO: 335 - DNA, 395 bp, Homo sapiens
  misc_feature 3, 16, 20, 34, 62, 115, 120, 143, 197, 263, 274, 304, 307,332, 344, 354, 372, 380, 392: n = A,T,C or G
ttnttttgtggacatntaanagtgtggttttatnccagttgtgtgtttcataaagacgaggncctcaaggacagctagtggcacatgctttggtcaagaagaggaaaagcaaaancagancagggctgcgttgccacaaaggnccggctgataagtgcagagcctgatctgaccacagcaaaggacagagaggaagnttagggggtggcagcttgggcagacagtggcttcaatccagagcagaggttcaggccctttggggntcagggacctnttttagaagccatggactttttccccaggnaantgcatgtatgcacacacatgcagtnttttagggacantttcaagagnttcctagaccctctagantccatganctctatggggtntgt

SEQ ID NO: 336 - DNA, 24 bp, Homo sapiens
gttgtgtgtttcataaagacgagg

SEQ ID NO: 337 - DNA, 22 bp, Homo sapiens
tttgcttttcctcttcttgacc

SEQ ID NO: 338 - DNA, 395 bp, Homo sapiens; identical to SEQ ID NO: 335
  misc_feature 3, 16, 20, 34, 62, 115, 120, 143, 197, 263, 274, 304, 307,332, 344, 354, 372, 380, 392: n = A,T,C or G

SEQ ID NO: 339 - DNA, 22 bp, Homo sapiens
tttggtcaagaagaggaaaagc

SEQ ID NO: 340 - DNA, 18 bp, Homo sapiens
caaaactcgggcatggac

SEQ ID NO: 341 - DNA, 336 bp, Homo sapiens
  misc_feature 71, 84, 122, 146, 248, 332: n = A,T,C or G
ttttttttgacatgtaagaagtggttttattccaggtgtgtgtttcataaagacagaggtcctcaaggcangctagtggcacantgctttggtcaagaagaggaaaagcaaaaacagaacangggctgcgttgccacaaaggaccnggctgataagtgcagaacctgatctgaccacagcaaaggacagagagaccctcttgaaggccctctggtcagcagtcctcttacattcaacaggcgcacccnggctccccagccccaaaggtccatgcccgagttttgcccagggcttctagtccatcctctggggagaggccttttccctggggnccag

SEQ ID NO: 342 - DNA, 19 bp, Homo sapiens
gtcctgtcagtcactgacc

SEQ ID NO: 343 - DNA, 19 bp, Homo sapiens
ccagctgggtaatcttggg

SEQ ID NO: 344 - DNA, 358 bp, Homo sapiens
gccattgcactccagcctgcaggacaggatacattttaccgtgagttacatggcaaagcctttctatgagtactccattcaatgacatttataactggtcctgtcagtcactgaccaaacactgagacacacattttatcttctttgatctttacaactctatcaggtaggtattttcaataccaccccatttacaaactagatatcaaagcccagagaagttaacatatctgcccaagattacccagctggcaggatggagggccaggatttaaaatcatgaagtctgatccagggtccatgctccttgctgctccttattgcctttcacccatcagtctgtatattcatagaacac

SEQ ID NO: 345 - DNA, 20 bp, Homo sapiens
cagctaggaagggaaaggct

SEQ ID NO: 346 - DNA, 20 bp, Homo sapiens
cacagagaaagctgctgtcg

SEQ ID NO: 347 - DNA, 325 bp, Homo sapiens
  misc_feature 127, 289, 296, 316: n = A,T,C or G
agttttttgggcaccatgcctctttttcttttatttacttcagctcattgacaaatgttatttaaatctcacagcacccctaagaagtagttattattatccctgctttgctggtgaggggaccgangtttcagaaagttcaagtaactagctgcaggttgcccagctaggaagggaaaggcttcaactctaggttagactcccagcctcttctctttctcctctgctgggcagaccgaatcctgggctgggaaggggccttccgacagcagctttctctgtgttgttnataatanctgtgggtccttctcggcancgtgactgc

SEQ ID NO: 348 - DNA, 21 bp, Homo sapiens
ttgaggacatggctaaactgc

SEQ ID NO: 349 - DNA, 23 bp, Homo sapiens
cttcgtcacttaatgttggttcc

SEQ ID NO: 350 - DNA, 294 bp, Homo sapiens
  misc_feature 176, 186, 189, 200, 201, 202, 203, 204, 205, 206, 207, 208,209, 210, 211, 212, 251, 256, 274, 279, 290: n = A,T,C or G
taactaaaggacatttatttatttttaccaagactttatcttgaggacatggctaaactgcatttccaccccccaccccatcttgaagaagggttagtatgtgaatgttataaagtagatatgaacagttgaaggactggaaccaacattaagtgacgaagaacaacttccatctnattcatcatnaanttgtttaagtnnnnnnnnnnnnngaaagagaaagaaaaagaggaggtaacgggggtttccgnttgancaagttcctcacttttcntctantacagtcattnttgg

SEQ ID NO: 351 - DNA, 22 bp, Homo sapiens
gaacagttgaaggactggaacc

SEQ ID NO: 352 - DNA, 20 bp, Homo sapiens
tcttgttcaatcggaaaccc

SEQ ID NO: 353 - DNA, 480 bp, Homo sapiens
  misc_feature 11, 16, 23, 31, 37, 39, 54, 55, 61, 63, 65, 66, 67, 71, 75,157, 300, 330, 331, 333, 375, 376, 379: n = A,T,C or G
taaaggacatntatcntatttcntaccaagngttccntnttgaggacatggctnnaatgcntntnnncccnccancccatcttgaagaagggttagtatgtgaatgttataaagtagatatgaacagttgaaggactggaaccaacattaagtgacngaagaacaacttccatctaaatcatcataaaaatgtttaagtaaaaaaaaaaaagaaagagaaagaaaaagaggaggtaacgggggtttccgattgaacaagatcctcacatttcatctaactacagtcaatcttggctagangtataacaaagtggaaacaggattactatnntnacaaaacttccactacagcacgctgtacacacctgtgttccnngcncaccccaacccccccagtggcttccaacacaattatttcccagcctgttgggcctgccgacgaaggaggcacgtagatcttctctttaatccagtctttgg

SEQ ID NO: 354 - DNA, 23 bp, Homo sapiens
accgtcaatttaagaaagccaca

SEQ ID NO: 355 - DNA, 23 bp, Homo sapiens
gtgagatttgggttggtttgtgt

SEQ ID NO: 356 - DNA, 21 bp, Homo sapiens
ggaattgactaagagagaacc

SEQ ID NO: 357 - DNA, 19 bp, Homo sapiens
ccgacctcaggtgaatccg

SEQ ID NO: 358 - DNA, 327 bp, Homo sapiens
  misc_feature 159: n = A,T,C or G
gccactgcactccagcctgggcaacagagcaagactccatctcaaaataagaaagaaagaaaaaaggaatacctataaaagcataaaaggggactagaatgatgaggaattgactaagagagaaccgtaaagaatataatagcagggccgggtgcggtngctcatgcctgtaatcccagcactttgggaggccggattcacctgaggtcgggagttcaagactagcctgaccaacacggaaaaaccctgtctctactaaaactacaaaactagccaggcatggtggcaggcgcctgtaatcccagctacttgggaggctgaggcagg

SEQ ID NO: 359 - DNA, 20 bp, Homo sapiens
gcttgtctttagggtgaacc

SEQ ID NO: 360 - DNA, 20 bp, Homo sapiens
cgttaaccatcagcacaagc

SEQ ID NO: 361 - DNA, 285 bp, Homo sapiens
  misc_feature 23, 45, 50, 52, 57, 113, 226, 229: n = A,T,C or G
gccattgcactccagcctgggtnatagagtgagattccatctcanaaaananaaaanaaaaaactttaaaaattgttggcttgtctttagggtgaaccaatttgttgactgtntctgtgagcagggaaagaaagaccatttaattaccttggtgtctgccaagaaatattaaactgacttcaaagcttgtgctgatggttaacggcatagagtgcaagctgttgtnttnattaatgtatctagcagatcctttggttcagtcaggctgcaactgtgaacttctaa

SEQ ID NO: 362 - DNA, 22 bp, Homo sapiens
ccaaagatgtgaagtgatttgc

SEQ ID NO: 363 - DNA, 20 bp, Homo sapiens
tgcagtgagcattgtcatgg

SEQ ID NO: 364 - DNA, 367 bp, Homo sapiens
accactgcactccagcctgggtgacagagcgataccctctctcaaaaaaaaaaaaaagaatatgaaatataaacaggagtttggtgcaagtttttagaaagccacagtaaaggtttttattaatctttagacccatgttttaaaaatagggatattagctaccaaagttatcaattcaaattaaagaactgggagaaaatataaaaaatgattttctctcaatatatagatggagaatcgaaggccaaagatgtgaagtgatttgcccaagatcacatgactaagctagttagtggttacagggatgattagattcagcattgcactccatgacaatgctcactgcatagcataatacatacaatcc

SEQ ID NO: 365 - DNA, 20 bp, Homo sapiens
tgcaattgttgccaatgact

SEQ ID NO: 366 - DNA, 22 bp, Homo sapiens
tccttcatgaatttgtcactgg

SEQ ID NO: 367 - DNA, 496 bp, Homo sapiens
gacactacaatctgctatttatttgacaaagtcagtttccagagagaatctaggcaaccatatagttttgaaggactagatgaaacctcaagtctcacaccagtcagctgttaacatccaatcaaggaagtcatttggactttccatactataccttctcttggtagtaaaattgtatgcaattgttgccaatgactacatacaactgtatcctatttgtgctactttcctcactgtggccagcagagggctcacaagctttatttccacagctgctgatccagtgacaaattcatgaaggaaataaatcataggcatgctagcttatgcgtcatagaaaacgtttttacaaactactacgtccactgccctgaagaaactagtcttggttcccccttagtgtaatgtgttttgaaatggtatagaaagtaaaaataaattaataatacaatattatacacttatttgacaagacagggtttacaaaaattttggc

SEQ ID NO: 368 - DNA, 20 bp, Homo sapiens
tgccaatgactacatacaac

SEQ ID NO: 369 - DNA, 18 bp, Homo sapiens
attacactaagggggaac

SEQ ID NO: 370 - DNA, 20 bp, Homo sapiens
ctagcatgcctatgatttat

SEQ ID NO: 371 - DNA, 20 bp, Homo sapiens
tggactttccatactatacc

SEQ ID NO: 372 - DNA, 188 bp, Homo sapiens
ctagcatgcctatgatttatttccttcatgaatttgtcactggwtcagcagctgtggaaataaagcttgtgagccctctgctggccacagtgaggaaagtagcacaaataggatacagttgtatgtagtcattggcaacaattgcatacaattttactaccaagagaaggtatagtatggaaagtcca

SEQ ID NO: 373 - DNA, 23 bp, Homo sapiens
ctagcatgcctatgatttatttc

SEQ ID NO: 374 - DNA, 23 bp, Homo sapiens
tggactttccatactataccttc

SEQ ID NO: 375 - DNA, 188 bp, Homo sapiens; identical to SEQ ID NO: 372

SEQ ID NO: 376 - DNA, 22 bp, Homo sapiens
gaatgatttcatgtttacaagg

SEQ ID NO: 377 - DNA, 21 bp, Homo sapiens
atatactcagcctaaccccag

SEQ ID NO: 378 - DNA, 364 bp, Homo sapiens
  misc_feature 180, 289: n = A,T,C or G
aaccattcacaattaaagtggaaagagacaaaattataaggcagccatccatggaatgatttcatgtttacaagggatccagaaaaagggacatttaaaatcactgttccagctattgaaccaggggaactgcagtcttatcccatgagacttctaacttgctgggagatgccacaaganaaaaagatcaaagccaatctccttgtgttaagccactggggttaggctgagtatatctaggaggaattccctaaatgggttgtctaggttctttccccaccaggttacnccatttcccttcagggcctccctgagggtgaatctaggatgtctccggggtccaagggggttttaatttcaccgc

SEQ ID NO: 379 - DNA, 20 bp, Homo sapiens
agagctaggcacacttcctg

SEQ ID NO: 380 - DNA, 18 bp, Homo sapiens
agggggaattgggagtgg

SEQ ID NO: 381 - DNA, 369 bp, Homo sapiens
  misc_feature 122, 286: n = A,T,C or G
agagctaggcacacttcctgcctcagggcctttgcacctgcagcttctctgctggaaacaccttacctctcctcaaagattaccttcttaactaggctgtccctgcccaccctctttgacanggacccatgcccactcccaattccccctaacctgctttattttcctccatagcatatgtcagcatctggcacatgacatctctatgtctcatttattcgtcatccgacaaccactacatgcaagtaggtgtaagctctaagggggacagggattttttgtctgncttgttcacaactgtatctccaacacctagagcagtgttttggacacaagttggcaacttcagtaattgctggaattaattgg

SEQ ID NO: 382 - DNA, 20 bp, Homo sapiens
gctggaaacaccttacctct

SEQ ID NO: 383 - DNA, 20 bp, Homo sapiens
cactgctctaggtgttggag

SEQ ID NO: 384 - DNA, 408 bp, Homo sapiens
  misc_feature 17, 228, 405: n = A,T,C or G
ggacacgttccttgccntcatgggccttttgcaccatgcagcgttctctgctggaaacaccttacctctcctcaaagattaccttcttaactaggctgtccctgcccaccctctttgacatggacccatgcccactcccaattccccctaacctgctttattttcctccatagcatatgtcagcatctggcacatgacatctctatgtctcatttattcgtcatccgncacccactacatgcaagtagtgtaagctctaaggagacagggattttggtctgtcttgttcacaactgtatctccaacacctagagcagtgcttggcacacagtggcaactcagtaattgctgaatcaatggagggaatctttataacagccctaagagacagttatttgtacccgnatt

SEQ ID NO: 385 - DNA, 22 bp, Homo sapiens
tgtctcatttattcgtcatccg

SEQ ID NO: 386 - DNA, 21 bp, Homo sapiens
tactgagttgccactgtgtgc

SEQ ID NO: 387 - DNA, 408 bp, Homo sapiens; identical to SEQ ID NO: 384
  misc_feature 17, 228, 405: n = A,T,C or G

SEQ ID NO: 388 - DNA, 20 bp, Homo sapiens
ctgccattgtcttgtgatgg

SEQ ID NO: 389 - DNA, 19 bp, Homo sapiens
ccttggcctcccaaagtgc

SEQ ID NO: 390 - DNA, 292 bp, Homo sapiens
  misc_feature 12, 42, 88, 177, 178, 188, 197, 199, 214, 215, 276, 277, 289: n = A,T,C or G
accattgcactncagcctggcgacggagcaagacgccgtttnaaaaaaaaaaagaaggaaggaaggaaagaggagagaggagagaganagtataagaaaccaccaacaaagaaagacatgggtttttcaatgggctgccattgtcttgtgatgggacaaactatttataaatcaaanngttgccaggnagctgggtntngtggctcacgcctgnnattccagcactttgggaggccaaggcagggagatcacctgagatcaggagttcgagaccannctggacaacatngtg

SEQ ID NO: 391 - DNA, 23 bp, Homo sapiens
gtcaattttattgccaaacaagg

SEQ ID NO: 392 - DNA, 18 bp, Homo sapiens
tgttgcgtggcaatcttc

SEQ ID NO: 393 - DNA, 444 bp, Homo sapiens
  misc_feature 61, 224, 251, 312, 326, 369, 388, 393, 410, 415, 420, 425,440: n = A,T,C or G
tttttttttttttttttttttttttttattatcagatgtcaattttattgccaaacaaggnaaatgggtaaacaagtaaatccctacctcccccagcccccacaaccccagggctactgcttattaccaggggaaccatttttccagagcccctcatttggaatggttggaagattgccacgcaacaaggactacccccaaaagggctaccattcaagtctggngtccaccagggccacctgggcttaagntcgatctaccccattccttcctttaccatcttctctaatttaggataacagtatccacaanttaagtgctactgntttccaaggactaaatgatttaacagttccctaccagataggntcttttgtctccatttcanagganggacaagagggacaagntgagnttagnttggnttaagtcaagacatntgct

SEQ ID NO: 394 - DNA, 20 bp, Homo sapiens
agagctgaccatatcagacc

SEQ ID NO: 395 - DNA, 21 bp, Homo sapiens
cacctagagtcaattcatagc

SEQ ID NO: 396 - DNA, 330 bp, Homo sapiens
  misc_feature 33, 60, 64, 78, 90, 104, 141, 157, 194, 242, 287, 298, 313: n = A,T,C or G
gccattgcactccagcctggcaacagagtgagngctccgtctcagaaaaaaaaaaaaaangaangaaaaagattacanctacaggaaaantgtgctttattttncagcattttaccaagagctgaccatatcagaccatantagcgacattgttganggcatttgcatcactaaaatcacacacctacatctgnctgcatttgtaattgctatgaattgactctaggtgcaagcggcctttncttttttatattacagttagggcattgtattgattgattgttttnttttaagtaanctttttattgaatanctacatacttcaaaaaa

SEQ ID NO: 397 - DNA, 20 bp, Homo sapiens
atagcgacattgttgaaggc

SEQ ID NO: 398 - DNA, 20 bp, Homo sapiens
caaatgcagacagatgtagg

SEQ ID NO: 399 - DNA, 330 bp, Homo sapiens
  misc_feature 33, 60, 64, 78, 90, 104, 242, 287, 298, 313: n = A,T,C or G
gccattgcactccagcctggcaacagagtgagngctccgtctcagaaaaaaaaaaaaaangaangaaaaagattacanctacaggaaaantgtgctttattttncagcattttaccaagagctgaccatatcagaccataatagcgacattgttgaaggcatttgcatcactaaaatcacacacctacatctgtctgcatttgtaattgctatgaattgactctaggtgcaagcggcctttncttttttatattacagttagggcattgtattgattgattgttttnttttaagtaanctttttattgaatanctacatacttcaaaaaa

SEQ ID NO: 400 - DNA, 22 bp, Homo sapiens
ctgggcagtgactctaggagac

SEQ ID NO: 401 - DNA, 22 bp, Homo sapiens
gggaatacagtgtccaatgacc

SEQ ID NO: 402 - DNA, 333 bp, Homo sapiens
  misc_feature 28, 30, 54, 137: n = A,T,C or G
gatcccccccacccctggtgccaccagncntgatgacctgctgcttgccctttncccaagggctgggcagtgactctaggagacaatctgcagggaggaaggaagggactggggttagcctagggcctgaggctttntagacagagccagcccacaaacccctcccacatacacacacacacacacacacacacacatatacacacacacacacctacacacacacacagctcctggtcattggacactgtattccctccctgatggttcattttcatgtgatttaatggtgagaagacagagctatatgattggccttgctagctctgagct

SEQ ID NO: 403 - DNA, 20 bp, Homo sapiens
ggactgcctacagtatgtcc

SEQ ID NO: 404 - DNA, 19 bp, Homo sapiens
ttgcaggagcagcttcagg

SEQ ID NO: 405 - DNA, 227 bp, Homo sapiens
accactgcactccagcctggggaacagagtgagactctgtctcaaaaagaaaaaataaataaataaataacatctgtttaatttctgataaggcccaggcacaactttacatagaccaaggactgcctacagtatgtccctaaaaggtagcagcatcctaaggacagctccaaggcagtgtgccatgcctctccctggtgtcctgaagctgctcctgcaaattcatg

SEQ ID NO: 406 - DNA, 20 bp, Homo sapiens
ggttggacagcaagaaaagg

SEQ ID NO: 407 - DNA, 20 bp, Homo sapiens
gaacttgccacaatgctacg

SEQ ID NO: 408 - DNA, 368 bp, Homo sapiens
  misc_feature 30, 42, 44, 54, 61, 62, 63, 64, 69, 70, 71, 72, 73, 74, 194,238: n = A,T,C or G
ggattacaggcgtgcgtgtacccagcccanatcctgattctntnagtcactttntcctttnnnnctttnnnnnntttccagggggttggacagcaagaaaagggagataaacttggcaaaacggttaaatacacatcctcagcctttatgttagaaatactagcatacaattaggacatccattagtgagtganatggggcatattacttcccccagcagaaaagctttgcctatttnttgcattaaatccgtagcattgtggcaagttcaccaacacactatctgtactcccatgagcaccatggacaaccccacccccactccaccagccagcacaatttgacttcacccacctcacctctaactg

SEQ ID NO: 409 - DNA, 20 bp, Homo sapiens
ttgccagtgttgaagttggg

SEQ ID NO: 410 - DNA, 19 bp, Homo sapiens
gagagctcaccatcaaggg

SEQ ID NO: 411 - DNA, 265 bp, Homo sapiens
  misc_feature 32, 34, 42, 56, 147, 243: n = A,T,C or G
cactgcactccagcctggcaataagagaagantncgtctcanaaaaaaaaaaaganaaggaaaagaaagaaagtatacccctaccaaatctcatgttaaattgtaattgccagtgttgaagttggggcttggtgggaggtgtttggntcatgggagcagattcctcatgaatggcttgggcgatccccttgatggtgagctctctgagttcacatgagatctggtggtttaaaaatatgtagnaccccctccccacctccacttt

SEQ ID NO: 412 - DNA, 20 bp, Homo sapiens
accccgttttcagcctttat

SEQ ID NO: 413 - DNA, 20 bp, Homo sapiens
cgaaaaatttgttttgcccc

SEQ ID NO: 414 - DNA, 206 bp, Homo sapiens
  misc_feature 8, 33, 54, 106: n = A,T,C or G
ctggaatngttttcactgtcctaggggaatttnctgttcttcagattgaatttnaccccgttttcagcctttatttcccaccagagcctgatggtgtttgtattgncaagccagaagactcctggcttggagagaattagagttagtacagcctgcctggccctgtcttttcagcctctatctgaaggggcaaaacaaatttttcg

SEQ ID NO: 415 - DNA, 21 bp, Homo sapiens
gtaaccttctcctactcaacc

SEQ ID NO: 416 - DNA, 20 bp, Homo sapiens
gccaacctttcagaaggagg

SEQ ID NO: 417 - DNA, 366 bp, Homo sapiens
  misc_feature 22, 86: n = A,T,C or G
accactgcactccagcctgggngacaggggacagggcgagactcatcacaaacaaacaaacaaaaaatgcactatagataatttanatgtaaccttctcctactcaaccctaatccctttgaggctgcatgcatgtcacactgatctttatattccctgctttccacaccttgttttgaaggagctcaagtatttgttctgtttgttagattgaatgctttgacccctgggcctttcctggagcttattttgctttgcttgttttgaaatgttgtaaaagtttgtgttgttttaatttgcctccttctgaaaggttggcctgcaaaaccaacaaaaccagggaacctttagaaaggctggtgaggg

SEQ ID NO: 418 - DNA, 19 bp, Homo sapiens
aggaccctctcagtgatgc

SEQ ID NO: 419 - DNA, 19 bp, Homo sapiens
cctagactgtggcttctgg

SEQ ID NO: 420 - DNA, 297 bp, Homo sapiens
  misc_feature 21, 40, 41, 42, 46, 50, 60, 89, 90, 110, 173, 237, 247, 261: n = A,T,C or G
ccactgcactccagcctgggnacaaagtgagactctgttnnntttnaganaagacaaganaagaaaaagaacacatgaaaaaatatgannctcttgaccaagagcagagncctggccaacagcaggtgttgaagaggaccctctcagtgatgcctgggaagaacactaaaaanaggcaaaacccacatggcaaagaaattgttcagtggcttccagaagccacagtctaggcaaganactgtcttgntctgtgcaccaggntcattctctgacaattccaggtttcgcagaaggaag

SEQ ID NO: 421 - DNA, 17 bp, Homo sapiens
tggactgaatcctggcc

SEQ ID NO: 422 - DNA, 21 bp, Homo sapiens
ctcccactgaacctttaaagc

SEQ ID NO: 423 - DNA, 407 bp, Homo sapiens
  misc_feature 42, 54, 352, 376, 387, 397, 404: n = A,T,C or G
tggcacacttgagctgactcagtgcaggtttaatatcctggngacttgcagtcnaattctaatgactttcaagggccagaatatggtgaaaatcacttaaaatatccgtcccttccatgccttagtttagcaggtaggctctatcttttgccatttctgtattttatgtgctgtgttcccgtttcactgggtatgaactgtgaaatggactgaatcctggccactttatgagtttgtttggttttataaggcatttcaatgtacattctataaatacaagcactccatttgcaaacagatcttaaggctaatattttctttcccattcatcttgccctccccctcctcccgncagctttaaaggttcagtgggagnagcccgatggngaattcaggncaagggnata

SEQ ID NO: 424 - DNA, 20 bp, Homo sapiens
tggcacacttgagctgactc

SEQ ID NO: 425 - DNA, 22 bp, Homo sapiens
caaaagatagagcctacctgct

SEQ ID NO: 426 - DNA, 339 bp, Homo sapiens
  misc_feature 42, 54: n = A,T,C or G
tggcacacttgagctgactcagtgcaggtttaatatcctggngacttgcagtcnaattctaatgactttcaagggccagaatatggtgaaaatcacttaaaatatccgtcccttccatgccttagtttagcaggtaggctctatcttttgccatttctgtattttatgtgctgtgttcccgtttcactgggtatgaactgtgaaatggactgaatcctggccactttatgagtttgtttggttttataaggcatttcaatgtacattctataaatacaagcactccatttgcaaacagatcttaaggctaatattttctttcccattcatcttgccctc

SEQ ID NO: 427 - DNA, 20 bp, Homo sapiens
taatttagcaagaatagcca

SEQ ID NO: 428 - DNA, 20 bp, Homo sapiens
tttttacttttaggagagaa

SEQ ID NO: 429 - DNA, 144 bp, Homo sapiens
taatttagcaagaatagccaggtgcagtggctcacacctgtaatcccagcactttgggaggccaaggtgggcggatcacgaggtcaggagatcaagaccatcctggctaacgtggcaaaaccccttctctcctaaaagtaaaaa

SEQ ID NO: 430 - DNA, 22 bp, Homo sapiens
taatttagcaagaatagccagg

SEQ ID NO: 431 - DNA, 23 bp, Homo sapiens
tttttacttttaggagagaaggg

SEQ ID NO: 432 - DNA, 144 bp, Homo sapiens; identical to SEQ ID NO: 429

SEQ ID NO: 433 - DNA, 20 bp, Homo sapiens
tttggtgctgtgatttctgg

SEQ ID NO: 434 - DNA, 22 bp, Homo sapiens
agccaaaccatatcactattgg

SEQ ID NO: 435 - DNA, 378 bp, Homo sapiens
gccactgcactccagcctgggtgacagagagagactccgtctccaaaaaaaaaaaaaaaaagatttgcttctaatttggatgtcttaagaaaaagatgccaagccattttgttgaaacattaatataggaataggacgacctgaaaaaaatgctcatgcaaatccaggtctataaatattgagtctttttggtgctgtgatttctggaaaacatgaataacatatatgaatcagtgatgactgtataacagaggtataaacagaatattgtaggaccacataggaggaagagtaattctgatcatggaagatgactttgtatttattagagaaattgggtaagaaacagtccaatagtgatatggtttggctctgtgt

SEQ ID NO: 436 - DNA, 24 bp, Homo sapiens
taggggtagcatttaagattcagg

SEQ ID NO: 437 - DNA, 22 bp, Homo sapiens
tgacagcacttgtgttcaactg

SEQ ID NO: 438 - DNA, 476 bp, Homo sapiens
tgaacaattattgtaggggtagcatttaagattcaggagtcattagcagtgatgattttgggacctgccgtataatctgttcttctattcccacgttagccaattgttcttgatgaatctatatgagtcatagaacacaaatctattgacggaagtcattagaatggcttgtgatatctgatggcttgaacttgcccacagttgaacacaagtgctgtcattgcatttcttccattgtgaatacgaattttcttcctcagaaatgctccacctgtaagaacagaaaatcgtcttatagttgagaatttatcctcaagagtcagctggcaggtttgttgaaatacagttttgagttattttgatgtggctttttaaaaaagttaatgggtagctaatgttgtattgttttattaaaagtagttttaaattaatggatttaatggaattgtaattttaaacatttaattaaatgtaat

SEQ ID NO: 439 - DNA, 21 bp, Homo sapiens
caaaatatcccccaaattaca

SEQ ID NO: 440 - DNA, 18 bp, Homo sapiens
tcagctggcaggtttgtt

SEQ ID NO: 441 - DNA, 278 bp, Homo sapiens
  misc_feature 16, 70, 209, 265: n = A,T,C or G
gggtttaatatttggntaaaaattgattttaaaaaacaagaaaaatatcctcaaaacatttacatttgancactaatattaaagttcaaaatatcccccaaattacatttaattaaatgtttaaaattacaattccattaaatccattaatttaaaactacttttaataaaacaatacaacattagctacccattaacttttttaaaangccacatcaaaataactcaaaactgtatttcaacaaacctgccagctgactcttgnggggtaaattctc

SEQ ID NO: 442 - DNA, 20 bp, Homo sapiens
aaccctttatttgccagcct

SEQ ID NO: 443 - DNA, 20 bp, Homo sapiens
gaccctccttattcggaagc

SEQ ID NO: 444 - DNA, 435 bp, Homo sapiens
  misc_feature 1, 2, 3, 4, 5, 6, 7, 8, 352, 363, 383, 389, 398, 408: n = A,T,C or G
nnnnnnnnaaaatcaatttttaaccaaatattaaaccctttatttgccagcctgtctgtgtcgttggccttatgacgaggagtgcctgtgggttatcctaatcgttgtcttggtcactcttggttgggcctggttgactttgccagtcagctcctacagtgatcagttggccacctctagatctgtgtttgccggtctagacgttatcggtgcacttccttgaagtcccagggttgcagcgatcccagagcgttgataacgtgatcctgatccctaagttgagacctgtcttcctgtaacgcttccgaataaggagggtcccggtcggaaaaagagtttgaaaagattacgnaaatttagggnttggtcggtttggaaatccntggatntgcaaggtnaaaggtgaanccctttgggaaccttcctccggaggta

SEQ ID NO: 445 - DNA, 20 bp, Homo sapiens
caagaagcaggtctcgatcc

SEQ ID NO: 446 - DNA, 22 bp, Homo sapiens
cgggagacctactaacagaacg

SEQ ID NO: 447 - DNA, 250 bp, Homo sapiens
gtcaaaaattgtatttaatgggtttgttgtagagtcttatctaggctgatttcttttcatttttcatagtaggtcaagaagcaggtctcgatcccggaccagaagttcctctaggtctcgtagccgatcccgttcccgtagtcgcaaatcttacagccggtcaagaagcaggagcaggagccggagccggagcaagtcccgttctgttagtaggtctcccgtgcccttgggagtcttgaatttctcatag

SEQ ID NO: 448 - DNA, 20 bp, Homo sapiens
aaagatatccagcccaaccc

SEQ ID NO: 449 - DNA, 24 bp, Homo sapiens
aaaaacaaaaaccacaaaaattcc

SEQ ID NO: 450 - DNA, 204 bp, Homo sapiens
  misc_feature 1, 2, 3, 4, 5, 6, 7, 8, 21, 44, 65, 66, 68, 69, 109, 116,139, 142, 163, 168, 169, 170, 171: n = A,T,C or G
nnnnnnnngtgagcagaaggnttatcaaaagacatttaatacanttaggttttcaacaacccctnngnngtccacatctacaaagatatccagcccaacccaacccccnttccaantcccacccccacagaaaagcacntanttaccagattttttagcaagnatggnnnnggaatttttgtggtttttgttttttaaaaaaag

SEQ ID NO: 451 - DNA, 23 bp, Homo sapiens
agtgtccaaagctattaattagt

SEQ ID NO: 452 - DNA, 23 bp, Homo sapiens
gtatattgacagagctcttttat

SEQ ID NO: 453 - DNA, 148 bp, Homo sapiens
agtgtccaaagctattaattagtttaattaaggcattaaactaattctgaattaacatttttataaccaagaactaaaatgttcaaatttttttctagtacaaaaaaattaaatttgctttagttataaaagagctctgtcaatatac

SEQ ID NO: 454 - DNA, 20 bp, Homo sapiens
agtgtccaaagctattaatt

SEQ ID NO: 455 - DNA, 20 bp, Homo sapiens
gtatattgacagagctcttt

SEQ ID NO: 456 - DNA, 148 bp, Homo sapiens; identical to SEQ ID NO: 453

SEQ ID NO: 457 - DNA, 21 bp, Homo sapiens
ctaatgtgtctgtccagcagc

SEQ ID NO: 458 - DNA, 25 bp, Homo sapiens
aaagagctctaaatttgcttgtaca

SEQ ID NO: 459 - DNA, 176 bp, Homo sapiens
  misc_feature 33, 136: n = A,T,C or G
ataatattttattatcaataacaaacagctgcnctaatgtgtctgtccagcagctgttaaagagtggaggacacccttgaccctaacaaggaaaacaaattaagcctttatgtacaagcaaatttagagctctttnaagtgtccaaagctattaattagtttaattaaggcattaa

SEQ ID NO: 460 - DNA, 24 bp, Homo sapiens
ttaattctacagcacttgtgagca

SEQ ID NO: 461 - DNA, 25 bp, Homo sapiens
aagcatcttaaagtcactcaattcc

SEQ ID NO: 462 - DNA, 250 bp, Homo sapiens
acttctgaagtttaattctacagcacttgtgagcatttatttctcttttgggtcacaaaacttggaatgggatttgggtatttgagtaatgggttaaacatatatattgattagttcaggaattgagtgactttaagatgcttatcagacacttttagagatcccagcaagaggcagattcggtttctggtttcatagagtttacagtcactgaacaagtctttaaaataagtagcaaattctaagttgg

SEQ ID NO: 463 - DNA, 20 bp, Homo sapiens
agcctcacctatccccaact

SEQ ID NO: 464 - DNA, 21 bp, Homo sapiens
aaaacttggaatgggatttgg

SEQ ID NO: 465 - DNA, 400 bp, Homo sapiens
cccttcccctggtggcctggattctggtcccaaagcaattctgaaagccagtgtggtaaactagagagagcagcaaaaacaccagtcttgcctgagtctttctccagcatttccagtacatctatcagaatcatcaagtcttggccgggaacacagacagggtgtctacccaagaagcctcacctatccccaacttagaatttgctacttattttaaagacttgttcagtgactgtaaactctatgaaaccagaaaccgaatctgcctcttgctgggatctctaaaagtgtctgataagcatcttaaagtcactcaattcctgaactaatcaatatatatgtttaacccattactcaaatacccaaatcccattccaagttttgtgacccaaaagagaaa

SEQ ID NO: 466 - DNA, 25 bp, Homo sapiens
gtaaactctatgaaaccagaaaccg

SEQ ID NO: 467 - DNA, 20 bp, Homo sapiens
gtcacaaaacttggaatggg

SEQ ID NO: 468 - DNA, 1580 bp, Homo sapiens
aaagaaggcatccagcaagaactgcacaagaaacggagtcagccggagaacaaggagtggtcttccactgcctcacaggaggatggaggcccacaacgcgtctgccccattcaacttcaccctgccacccaactttggcaagcgccccacagacctggcactgagcgtcatcctggtgttcatgttgttcttcatcatgctctcgctgggctgcaccatggagttcagcaagatcaaggctcacttatggaagcctaaagggctggccatcgccctggtggcacagtatggcatcatgcccctcacggcctttgtgctgggcaaggtcttccggctgaagaacattgaggcactggccatcttggtctgtggctgctcacctggagggaacctgtccaatgtcttcagtctggccatgaagggggacatgaacctcagcattgtgatgaccacctgctccaccttctgtgcccttggcatgatgcctctcctcctgtacatctactccagggggatctatgatggggacctgaaggacaaggtgccctataaaggcatcgtgatatcactggtcctggttctcattccttgcaccatagggatcgtcctcaaatccaaacggccacaatacatgcgctatgtcatcaagggagggatgatcatcattctcttgtgcagtgtggccgtcacagttctctctgccatcaatgtggggaagagcatcatgtttgccatgacaccactcttgattgccacctcctccctgatgccttttattggctttctgctgggttatgttctctctgctctcttctgcctcaatggacggtgcagacgcactgtcagcatggagactggatgccaaaatgtccaactctgttccaccatcctcaatgtggcctttccacctgaagtcattggaccacttttcttctttcccctcctctacatgattttccagcttggagaagggcttctcctcattgccatattttggtgctatgagaaattcaagactcccaaggataaaacaaaaatgatctacacagctgccacaactgaagaaacaattccaggagctctgggaaatggcacctacaaaggggaggactgctccccttgcacagcctagcccttcccctggtggcctggattctggtcccaaagcaattctgaaagccagtgtggtaaactagagagagcagcaaaaacaccagtcttgcctgagtctttctccagcatttccagtacatctatcagaatcatcaagtcttggccgggaacacagacagggtgtctacccaagaagcctcacctatccccaacttagaatttgctacttattttaaagacttgttcagtgactgtaaactctatgaaaccagaaaccgaatctgcctcttgctgggatctctaaaagtgtctgataagcatcttaaagtcactcaattcctgaactaatcaatatatatgtttaacccattactcaaatacccaaatcccattccaagttttgtgacccaaaagagaaataaatgctcacaagtgctgtagaattaaacttcagaagttctaacctt

SEQ ID NO: 469 - DNA, 24 bp, Homo sapiens
tacctgtccccttacttcctatgg

SEQ ID NO: 470 - DNA, 23 bp, Homo sapiens
acctatcagctctcagaaatggg

SEQ ID NO: 471 - DNA, 192 bp, Homo sapiens
tacctgtccccttacttcctatggctgaagcagcaatatcactcagtgagtacttctgaactctctctgtgccatcaagcacatttgtaaatttctgaatttggtgctgcatagctgggggccacagcaggtttaggcggtcagtgaatactgacaatagagagcttggcccatttctgagagctgataggt

SEQ ID NO: 472 - DNA, 20 bp, Homo sapiens
ttagcatttctgcagccatg

SEQ ID NO: 473 - DNA, 20 bp, Homo sapiens
actaaatgcacttgggccac

SEQ ID NO: 474 - DNA, 482 bp, Homo sapiens
  misc_feature 2, 27, 38, 287, 410, 440, 453, 467, 473: n = A,T,C or G
tntacatctcacaggtgccagtgcatntttataatccngtgtttgcattctcaaaagctagagttaagttagcatttctgcagccatggtatgaggaatctgacgcttcactgcgtcttgtaatcttgaaagaaactgtgcatagggttcctatgacccttgcatgatatgtaaaaaggattgtactgggactccctcttcaggaattgtggcccaagtgcatttagtggcctatgcgcactgctgataagggccgtctggggagtgcccatttgacgttccagggnctgaataaggggccattaccccaatagcatatcctctgtaatgtctccgtttccagcagcacagttctgtctagcctgctctgcacacttttcttgccaattgaaattacacatcagctatgnactcgcggacaaggcaagttcgcggcaagngtttcacatcaanggggtaaaggtgtntggggncccaacact

SEQ ID NO: 475 - DNA, 20 bp, Homo sapiens
catacagtaggggtgaatgc

SEQ ID NO: 476 - DNA, 19 bp, Homo sapiens
caggcagtcacctgagtcc

SEQ ID NO: 477 - DNA, 401 bp, Homo sapiens
  misc_feature 6, 30, 31, 37, 38, 42, 349, 381: n = A,T,C or G
atgctnaggtcggattacaggtgtgagccnntcaccnngccngtgtttagtttagcctttaaattttctagacattgtgtatattatatgcacccaggtagctcactgtaactagttatacatacagtaggggtgaatgctcaaaaccttcttctgctagaggcatacaataaaaaaagttggagcccactgattaagagtaaccttctaattgtatagatgaagtaagtgaggatagagaaataagccatgtgtccaggatctcaatgtgaattagccttggggcacagagcaggcaccaggactcaggtgactgcctgtccagagcttttagtgatatgggattttntttgttgttattaaggatacagcatctccctnccccaaagcattgactttgg

SEQ ID NO: 478 - DNA, 23 bp, Homo sapiens
acagcaggacaactctttttcca

SEQ ID NO: 479 - DNA, 23 bp, Homo sapiens
ccaactgtctaagaacccctgaa

SEQ ID NO: 480 - DNA, 388 bp, Homo sapiens
cgttttcatacttttaaacagcaggacaactctttttccaaacaaattcagaaggagcctcaatttgtacgacagataatgatatttgatcagcttgaatgtatctcatttcatcttgtttttgttgtgtttttgcaaagtgtgagaaaatcctgatttacattgcaaatggtaacagctcactttgcaatagcagaatgttcttcagttaaacagggctggaactttgaatgaagggtagtaagataattttatttcaaagtggaacattcaggggttcttagacagttggcccaaacacctcgctgacaatgctcacggagcctgtgtgcctgagccctgcccagcgtttgcctatagtgcacatgggccattgtggtgaacttta

SEQ ID NO: 481 - DNA, 23 bp, Homo sapiens
tgcaaagtgtgagaaaatcctga

SEQ ID NO: 482 - DNA, 23 bp, Homo sapiens
acacatgtctgtccacgtgaaat

SEQ ID NO: 483 - DNA, 480 bp, Homo sapiens
gacaactctttttccaaacatattcagaatgagcctcaatttgtaggacagataatgatatttgatcagcttgaatgtatctcatttcatcttgtttttgttgtgtttttgcaaagtgtgagaaaatcctgatttacattgcaaatggtaacagctcactttgcaatagcagaatgttcttcagttaaacagggctggaactttgaaggaagggtagtaagataattttatttcaaagtggaacattcaggggttcttagacagttggcccaaacacctcgctgacaatgctcacggagcctgtgtgcctgagccctgcccagcgtttgcctatagtgcacatgggccattgtggtgaactttacttgcttctagaatttcacgtggacagacatgtgtagcttgcattaatagaaaacaaaacataacacttagaggtacagcttcttaatcaatgaatgacacattttgaaaacattt

SEQ ID NO: 484 - DNA, 23 bp, Homo sapiens
cccaactcttaggtggtgttgat

SEQ ID NO: 485 - DNA, 23 bp, Homo sapiens
ctcctccctcttccttccataat

SEQ ID NO: 486 - DNA, 485 bp, Homo sapiens
ggaattctctgaactccattttgcctaattaatgtacccatctgagtagagttattaatattatatatcttcaaagcctgaatagttaaagcatgcgtatattaaatataatgcttcctctgcttatgtatgttcttattttctacacttgtcataaatttaacagttggggtcaagcccccaactcttaggtggtgttgatgctgggatattggacagggaaagatacctttctggagaaggaatgaccatctggaagtctctgtacactggagtgaaactctctggagggtcctgatccctcaggaaggtctcttccaggagctgggagtctccccggggttgcaagcttgcaagctgcataggaagagaccttcttgaggtggcatcttatgtctttatagtgactgtccagcatctgccacatcagagatccctggaggctctatgctcgcccattatggaaggaagagggaggaggcacc

SEQ ID NO: 487 - DNA, 23 bp, Homo sapiens
tcatttgataaatgggaagcagg

SEQ ID NO: 488 - DNA, 23 bp, Homo sapiens
tgctcaggggcaaaaataaataa

SEQ ID NO: 489 - DNA, 579 bp, Homo sapiens
cttcattacaaactgtgtgaagagccatgaaggaaaaatgaagtgtgagagagtattacaggagattgtcctcacctgggagagtcagggagaacctcctggaagagaccgcctgagccaaaatccaaagcagggtgggagggaatggagaaggaacagcgtgcctgaaggcctggaagtagcagcagaggtagctcatttgataaatgggaagcaggcccgtgtgccccaccagcagggagcaagggggagcagggaagagagagcaaagggccagagaggggcccccgggtctgattctcaccaggccggggagacgatgtaagggtccccgagctcatgggtttaaagcaggggcaactcgaggggggttgaggctggggatcgtgtgcagggcttgactgaacaatgctgtcctctcccatttctccccgtcagctcacccctcttctgtggggcagccctggaggcagtgggcttctctggagatgatgatctgagttatttatttttgcccctgagcactggactctatcaaatgctgggctcatgagacactatctggatattttccttttg

SEQ ID NO: 490 - DNA, 18 bp, Homo sapiens
tctgcactcaaggagggc

SEQ ID NO: 491 - DNA, 20 bp, Homo sapiens
tcaccctcagtgaccctacc

SEQ ID NO: 492 - DNA, 404 bp, Homo sapiens
tttatggcttatgtaatattttaatattcaatgtaggtatgaaaatcctcccatattacaagaactgtatctcttctctggagcaagacaactgaaaacattctgtttatttctcccatcatccagatgaaaatcttggactgcccatcggcgccagccatcagcaaagaaggtctgcactcaaggagggcaaaaaggttttttggggaagctttgcccttttgcaggtcaaggacctccacagatttcccagatgtagtcagagaagcccatgaggcataaagccacgtgcagggaaggaatcttcctgcagggtagggtcactgagggtgaagagatacagctgctctgccacggggaggtcctaaatggaaatctttatgaagtgagaaacgacaagatgc

SEQ ID NO: 493 - DNA, 23 bp, Homo sapiens
tcacatgcactgcttcatgtcta

SEQ ID NO: 494 - DNA, 23 bp, Homo sapiens
agacccatacatcatggcttgac

SEQ ID NO: 495 - DNA, 397 bp, Homo sapiens
  misc_feature 177: n = A,T,C or G
agctctggtcagtgaaataccagcaggaatgagtgtcatttccaggactggcccatgaaactccctcacatgcactgcttcatgtctactccatctggttgactgaggatggagatgacccccagagtaaccttggaagccacatgatgaagatggcagagtcactctcagcctggntcccagagtgactgcatagagcaatccctgcccctactcctacccctacacacacacacacacacacacacacatacacacactcacacacacacacaccctacaacctgcgaccatgctgaactattatatgggaaagaaaaattttccactgtgtcaagccatgatgtatgggtctacttgtgactgtagcctggcccaccctagcacactctcacag

SEQ ID NO: 496 - DNA, 20 bp, Homo sapiens
acgatcctgtgggagacaag

SEQ ID NO: 497 - DNA, 18 bp, Homo sapiens
ggccttgcacgagacact

SEQ ID NO: 498 - DNA, 412 bp, Homo sapiens
tttcaagatttacccattttttattttttataaaacaagctacaaatagtttccctctctccttcacaaaggaaaaccacacaacaccacctacacacacgatcctgtgggagacaagatgcctggggagatctcgaagatccaaacatctacaggcaggcgccgtctccatgtgtgcatgcttcctccaggcctgaaagtggggccagtgtctcgtgcaaggcccactcagctccggcacgttgagttctctcattggggctaatgggagaaggcttccttcccacctttccacgttggggcagggcaccagtcattcctgagataacctctaggactttctccaggacagcagggacctcctttagcccaagaccccatcagatcctgtcccgagaaggttgtgctcctc

SEQ ID NO: 499 - DNA, 23 bp, Homo sapiens
tcgaagatccaaacatctacagg

SEQ ID NO: 500 - DNA, 19 bp, Homo sapiens
ccattagccccaatgagag

SEQ ID NO: 501 - DNA, 426 bp, Homo sapiens
  misc_feature 39, 99, 203, 268, 332: n = A,T,C or G
tacccatttttaattttttataaaacaagctacaaatangtttccctctctcctttcacaaaggaaaaccacacaacaccacctacacacacgatcctntgggagacaagatgcctggggagatctcgaagatccaaacatctacaggcaggcgcgtcttccatgtgtgcatgcttcctccaggcctgaaagtggggccagtntctcgtgcaaggcccactcagctccggcacgttgagttctctcattggggctaatgggagaaggnttccttcccacctttccacgttggggcagggcacccagtcattcctgaggataacctctaggantttctccaggacagcagggaccctcctttagcccaagaccccatcagatcctgtcccgaggaaggtttttgctcctcccacagggaacaagtgc

SEQ ID NO: 502 - DNA, 23 bp, Homo sapiens
ttggcattgttagttcaaagcct

SEQ ID NO: 503 - DNA, 23 bp, Homo sapiens
acacaatgacaaatggacaacca

SEQ ID NO: 504 - DNA, 514 bp, Homo sapiens
tcaagctgggtgtctgccctttgcaaccaaagaatcctctaaaataatatggaccatcttattcatgtctctacctccagtagctgactcagattttggcatttaatatgggcttcagaaacattggcattgttagttcaaagcctgaaattgtatttgttgtaatgtggaatcaggaattgaggtgggagcaagcacatgtcataatgtgacagatggacaaggcttataccttagagctgtatagtgaagtattaactccacacattctgagcatctctttgggtctgagtttattctggtggtatttggcctaccatgctgcagaagtgttggctatttcttatcgaaccaagaatgattagctctcctagggtatagccctgaaagacaaaatgatagagaccatagcatgcatacacattagatgacttggttgtccatttgtcattgtgtttgcgtggtgcacagggtatttggtgtgggagacagaatagctgatatggtcactgtt

SEQ ID NO: 505 - DNA, 20 bp, Homo sapiens
actacttctcctgggaccag

SEQ ID NO: 506 - DNA, 20 bp, Homo sapiens
ggaccaagaggctctactgt

SEQ ID NO: 507 - DNA, 346 bp, Homo sapiens
  misc_feature 129, 147, 274, 289, 295, 298, 301, 303, 321: n = A,T,C or G
ctgtattttctgatgctttgacatctggggcattgctgtctctagagagactacttctcctgggaccagccaatttctagtgatagtagaggactcaccctgcacgtgcacctttcatatacagatcanccaatccaaaacctacanctccaaccacctcctttagggagctctcacactccagaccactatccagctgccctaattacccctggtgccagacagtagaggcagtctctacaccctacagctcaatcaagtcattcaaacccgntaatcctaaacctgnttactntgnccntnccattctttggcactgantccacagtagagcctcttggtccat

SEQ ID NO: 508 - DNA, 20 bp, Homo sapiens
ctgatgctttgacatctggg

SEQ ID NO: 509 - DNA, 20 bp, Homo sapiens
aggtggttggaggtgtaggt

SEQ ID NO: 510 - DNA, 428 bp, Homo sapiens
  misc_feature 234, 281, 312, 334, 390, 423: n = A,T,C or G
tttttttttctgctattttctgatgctttgacatctggggcattgctgtctctagagagactacttctcctgggaccagccaatttctagtgatagtagaggactcaccctgcacgtgcacctttcatatacagatcaaccaatccaaaacctacacctccaaccacctcctttagggagctctcacactccagaccactatccagactgccctaattacccctgggtgccagnacagtaggagggcagtctcttacaccctacaggcttcaattcaagtncattcaaacccggataattcctaaaacctgntttactctggcccctcccattncttttggccactggaattccacaggtaggaggcctcttggttccatggtttttccnttttggctcctttctggccttgcggggttgaancgggg

SEQ ID NO: 511 - DNA, 20 bp, Homo sapiens
ctgggaccagccaatttcta

SEQ ID NO: 512 - DNA, 20 bp, Homo sapiens
accaggggtaattagggcag

SEQ ID NO: 513 - DNA, 346 bp, Homo sapiens; identical to SEQ ID NO: 507
  misc_feature 129, 147, 274, 289, 295, 298, 301, 303, 321: n = A,T,C or G

SEQ ID NO: 514 - DNA, 23 bp, Homo sapiens
aatgaaagagtaaagctgtagga

SEQ ID NO: 515 - DNA, 23 bp, Homo sapiens
tctgaaacctctaaggagaagta

SEQ ID NO: 516 - DNA, 347 bp, Homo sapiens
cttttccaccagggtgggggggaaaagagtgcttctttgccccaaatgctggtttcataaaacctaaagatgtcacatggaaacacaccattcccccaatccccctcaaaaaactacttgcacttaaatgaaagagtaaagctgtaggactttactgagcagtgtcctgtggggtccttgcactgccatgctcttgaggggctcgaggtgtatgaattccccagcattacttctccttagaggtttcagatgagcagtatgagctccaaactcatgctagacccaagtatttcatgaaagaacaatccttgaatgactttatacagcaaagctatatttcactgtgt

SEQ ID NO: 517 - DNA, 23 bp, Homo sapiens
gttcttttgctccagtctgctgt

SEQ ID NO: 518 - DNA, 23 bp, Homo sapiens
tctttgtattctccctgcagctc

SEQ ID NO: 519 - DNA, 23 bp, Homo sapiens
ttctgccctccaagagtttactg

SEQ ID NO: 520 - DNA, 23 bp, Homo sapiens
tttattgggcattttacaccagg

SEQ ID NO: 521 - DNA, 687 bp, Homo sapiens
ccagccccttgtgctgttctgggttgtctgacacagacgaagcagagaacagtagaataaacagctcagtaaacaattcattgagggaaagagagtgagaagattcactggacagctagaggaggaaatactgctggtgactatggaagaaatttgccctaaggcctgcaggcaatagcttggtcttatttatcctggtgtcccaccctctcctccaacacatactgccctggcaggtacgtagaagatgcgtgaaaatatcttttgaattgagctatgcaaaaaatactggattctgccctccaagagtttactgtttagtttcacagaaagcacatgccctcctttctctgcctcttgaagactgacctatctttcaaggccactggcccaattctgttttctaagtaagaccactgagtcagtggtgacctctccttctccctaacaaagtctgatttacttgaatatacaactatctccctcttggcctgtgaatttcttgtgttagggaacatatctgatttatccttatctcttccacagtacctggtgtaaaatgcccaataaatgcattgaaatattcatgaagcttactaaatgctctgccttatgagccatgaaatataaagtgccttaaactttgtttttctcttatggtaaataaggataataataatgacaccc

SEQ ID NO: 522 - DNA, 24 bp, Homo sapiens
tgcttggttatttgactccaaaat

SEQ ID NO: 523 - DNA, 23 bp, Homo sapiens
ccagggcttctatttccttcatt

SEQ ID NO: 524 - DNA, 325 bp, Homo sapiens
ggctatttgtaaatgcttggttatttgactccaaaattgaataagtattggggaagaatccctcacctacttccaaatcccttacatatcaattttacacaaagcccctaaaccttcagttccaatcactctgaatttcatatacctccattattaaattcaatacatcattgcagagaaaagacaacggtgccaactgggtttggttggtgcctgcacacccacagtggcaactaagtgtaatctctaaatatggaatcaggtctgctgtttcattttttaatgaaggaaatagaagccctggccccctcactagagatgctgc

SEQ ID NO: 525 - DNA, 22 bp, Homo sapiens
ggctatttgtaaatgcttggtt

SEQ ID NO: 526 - DNA, 20 bp, Homo sapiens
gcagcatctctagtgagggg

SEQ ID NO: 527 - DNA, 328 bp, Homo sapiens
ggctatttgtaaatgcttggttatttgactccaaaattgaataagtattggggaagaatccctcacctacttccaaatcccttacatatcaattttacacaaagcccctaaaccttcagttccaatcactctgaatttcatatacctccattattaaattcaatacatcattgcagagaaaagacaacggtgccaactgggtttggttggtgcctgcacacccacagtggcaactaagtgtaatctctaaatatggaatcaggtctgctgtttcattttttaatgaaggaaatagaagccctggccccctcactagagatgctgccct

SEQ ID NO: 528 - DNA, 24 bp, Homo sapiens
tgcttggttatttgactccaaaat

SEQ ID NO: 529 - DNA, 22 bp, Homo sapiens
acttagttgccactgtgggtgt

SEQ ID NO: 530 - DNA, 255 bp, Homo sapiens
ggctatttgtaaatgcttggttatttgactccaaaattgaataagtattggggaagaatccctcacctacttccaaatcccttacatatcaattttacacaaagcccctaaaccttcagttccaatcactctgaatttcatatacctccattattaaattcaatacatcattgcagagaaaagacaacggtgccaactgggtttggttggtgcctgcacacccacagtggcaactaagtgtaatctctaaatatg

SEQ ID NO: 531 - DNA, 21 bp, Homo sapiens
tgaaacagcagacctgattcc

SEQ ID NO: 532 - DNA, 21 bp, Homo sapiens
cctcacctacttccaaatccc

SEQ ID NO: 533 - DNA, 328 bp, Homo sapiens; identical to SEQ ID NO: 527

SEQ ID NO: 534 - DNA, 23 bp, Homo sapiens
ctgctggtcacaatatttttatc

SEQ ID NO: 535 - DNA, 23 bp, Homo sapiens
tgtgtgtgttagataagctttgt

SEQ ID NO: 536 - DNA, 360 bp, Homo sapiens
  misc_feature 87, 128, 198: n = A,T,C or G
tggcacgaggcacaaactccgaatgagtgaatcctaaagcgttgctcctggaggaaatacaggctgctggtcacaatatttttatcngctgatcaatatataccttgtcttatgtgtgtttctgcttntggacactttatttaatatatacgttgattcattaactctgaactctctaggcaacagcattataactcntgccttcacaaagcttatctaacacacacatttcctcttcaggcacatcccagccttcttgcacttaggattcagcagtatgcttaagggccattttcaacagcaaactcatcagcgcaaacacaaacatgtgaaaaacgtagcacttaaagagactgcaaa

SEQ ID NO: 537 - DNA, 23 bp, Homo sapiens
taggattggcccagtattgaaga

SEQ ID NO: 538 - DNA, 23 bp, Homo sapiens
ataggactggggtggaaaatagg

SEQ ID NO: 539 - DNA, 23 bp, Homo sapiens
agcacagatgccaatagtgtgaa

SEQ ID NO: 540 - DNA, 23 bp, Homo sapiens
gatgtattctgccaccatcacaa

SEQ ID NO: 541 - DNA, 23 bp, Homo sapiens
caaaactctccaggaagtccaga

SEQ ID NO: 542 - DNA, 23 bp, Homo sapiens
ggtcatatgccaaatactgtgcc

SEQ ID NO: 543 - DNA, 23 bp, Homo sapiens
agcatttgacacaccaagtttca

SEQ ID NO: 544 - DNA, 23 bp, Homo sapiens
gcctccgtctcctcattctttat

SEQ ID NO: 545 - DNA, 23 bp, Homo sapiens
ttcacctatcctgttcccacact

SEQ ID NO: 546 - DNA, 23 bp, Homo sapiens
gttaattgggtggaagacagtgc

SEQ ID NO: 547 - DNA, 21 bp, Homo sapiens
ggcacaagcaaaactaagcca

SEQ ID NO: 548 - DNA, 20 bp, Homo sapiens
gaagtcctctcaggcccctt

SEQ ID NO: 549 - DNA, 369 bp, Homo sapiens
  misc_feature 291: n = A,T,C or G
gctggttcagttttagtgaataggtaatgttcactcgaaaatatatcaatagatattaacaagcaaacaaataaaattctggcacaagcaaaactaagccacagtgacagaaagcagatcaatagttgcctgtgggaagagcggatgagtataaaggggcctgagaggacttctgggggagatgaaaatgttctatgtcttgactgaggttgttgctctacatgtatgtacttgtataaaaactcttcaaactatacacttaaaacaggtgagtttttagtagtagtagtngattgtttgggatacctgtaactttatctccattagaaatgtcagatattttaatatcatcagttagtttttgcaggt

SEQ ID NO: 550 - DNA, 25 bp, Homo sapiens
acaaatacaaacaaattcaatttcg

SEQ ID NO: 551 - DNA, 20 bp, Homo sapiens
gttctgctttgcccactctc

SEQ ID NO: 552 - DNA, 208 bp, Homo sapiens
  misc_feature 61: n = A,T,C or G
cattggtggtcaataaaggaaaagcccaacttttctgaagggcagcctcaatattatagtncctgcaaactacaaatacaaacaaattcaatttcgagagttgatcagttgggctaacaagatggatttgtgcttctactggtggaaactgacctctctagaaaatggacagatttacattagagagtgggcaaagcagaaccaacca

SEQ ID NO: 553 - DNA, 21 bp, Homo sapiens
ccacaatacctgcagtattcc

SEQ ID NO: 554 - DNA, 21 bp, Homo sapiens
cagtgacttatggaatccagg

SEQ ID NO: 555 - DNA, 358 bp, Homo sapiens
  misc_feature 19, 252, 253, 254: n = A,T,C or G
ggattacaggtgtgagccncctgctggcctgactgaggcttttgaatcaacattcaaaagtgagttgttctctgccacaatacctgcagtattccacactgaggctgctctttcgttgtgtcccagattgaatagctaaagctaactgaagactaccgtgtgatgtgagaaataaaccctggattccataagtcactgatatttgcagatgacttatgattctgaccttataaagtcaggataatatatttnnntgtatttctaccatattatttgctgttctttgtatattgcttcctgcattcattttcttctattgtgccttcttgattgctctttaaattttgaaaattccttt

SEQ ID NO: 556 - DNA, 21 bp, Homo sapiens
aaaagatccctgacttcatgg

SEQ ID NO: 557 - DNA, 20 bp, Homo sapiens
aaattgtaacctgccgttcc

SEQ ID NO: 558 - DNA, 361 bp, Homo sapiens
  misc_feature 345: n = A,T,C or G
tgagccaagcaacagtctcccatttggaatacaacaatgttaagaacagaaaaagatccctgacttcatgggccttatattctcacagacagatatagacgttaagcaataaatatataaataagtaaattcttattagaattagtatattagaaagtgattaattgttataggcaaaaactaaaaaaagatgacgaaatttgaaagcttgtagggggaggggaacggcaggttacaattttaaacaggggtgctcaggggtagggcctcattgagggggacggtattttaggcaaggcgcctgaaggaaagtaaggggagggtaggccctgtgcaaagctgggngccagtgggggtcccg

SEQ ID NO: 559 - DNA, 22 bp, Homo sapiens
ccaacctgctgaaaagaataca

SEQ ID NO: 560 - DNA, 22 bp, Homo sapiens
ttcatgctgagttctagttgcc

SEQ ID NO: 561 - DNA, 313 bp, Homo sapiens
  misc_feature 120, 222, 228, 229, 230, 231, 232, 233, 234, 235, 236, 237,238, 239, 240, 241, 242, 243, 244, 245, 246, 247, 248: n = A,T,C or G
  misc_feature 249, 250, 251, 252, 253, 254, 255, 256, 257, 258, 259, 260,261, 262, 263, 264, 265, 266, 267, 268, 269, 270, 271: n = A,T,C or G
  misc_feature 272, 273, 274, 275, 276, 277, 278, 279, 280, 281, 282, 283,284, 285, 286, 287, 288, 289, 290, 291, 292, 293, 294: n = A,T,C or G
  misc_feature 295, 296, 297, 298, 299, 300, 301, 302, 303, 304, 305, 306,307, 308, 309, 310, 311, 312, 313: n = A,T,C or G
tttttttttcaacttaatttactttttattaaaaccaacctgctgaaaagaatacaaattttgactaggaggagaaagggggagtggatttatgattttatggcaattataacaggagtntttcaatggagactttaggcaactagaactcagcatgaaaccagaaggtagaagctgataaaggcaggggtaaaaaggagaaaatgagttcaaaacaactanctttcnnnnnnnnnnnnnnnnnnnnnnnnnnnnnnnnnnnnnnnnnnnnnnnnnnnnnnnnnnnnnnnnnnnnnnnnnnnnnnnnnnnnnn

SEQ ID NO: 562 - DNA, 25 bp, Homo sapiens
atttcgaggtgtaaaatatacgtgg

SEQ ID NO: 563 - DNA, 25 bp, Homo sapiens
atcttcactaaaggtcatgtacagg

SEQ ID NO: 564 - DNA, 456 bp, Homo sapiens
  misc_feature 21, 30, 249, 383, 426: n = A,T,C or G
tttttttttggagcagtattnacatttttnatttcgaggtgtaaaatatacgtggccaacattgttactttcatccacagatggaatagctgggaagtataaaaacctgtacatgacctttagtgaagattatttgtcatcaaattacccatatccaagtttccatgggcctggaatttcctttccacttgatagaagtatatattaggaagtccagttaatagtatttttatttaaaaaaaaaaaaanggaaaaaagattcagcagagtcaagttgtcttagtcttaaggctttctggatttcttccttggaggaggtcaggatcttcccaaggcctggggtcctcgaatattcttccagtcatcaaacttgggagtctttnattttctcatattccgactctaaagatattttattcccctttncagttttttttccaagctcagggtcccttt

SEQ ID NO: 565 - DNA, 23 bp, Homo sapiens
attgctctccctcccctttattt

SEQ ID NO: 566 - DNA, 23 bp, Homo sapiens
cttccatgggccagaagtagata

SEQ ID NO: 567 - DNA, 403 bp, Homo sapiens
  misc_feature 298: n = A,T,C or G
tattgctctccctcccctttattttctaattctggaacttctagctatgtgttagaacttttaggtctagcttttgtaaaatactttttttcattcatctcatttttatctcttcatgcattattccagtgaaatcctctggttatgcttctattttacttatttgatctttgcttttttgtagttgttgtttattgatttcagccatcatactctttttcctgaaggctttgccacatacagaaaggctttttatacagttaatatagcattagctcctttttacctctatggattntttttttttttttttggtagatatctacttctggcccatggaaggtattcctttttgttttcaagtgcagcattatattagtatttttggtatttctccataata

SEQ ID NO: 568 - DNA, 26 bp, Homo sapiens
ttcatctcatttttatctcttcatgc

SEQ ID NO: 569 - DNA, 26 bp, Homo sapiens
aatataatgctgcacttgaaaacaaa

SEQ ID NO: 570 - DNA, 361 bp, Homo sapiens
ctagctatgtgttagaacttttaggtctagcttttgtaaaatactttttttcattcatctcatttttatctcttcatgcattattccagtgaaatcctctggttatgcttctattttacttatttgatctttgcttttttgtagttgttgtttattgatttcagccatcatactctttttcctgaaggctttgccacatacagaaaggctttttatacagttaatatagcattagctcctttttacctctatggagtcttctttttcttttttggtagatatctacttctggcccatggaaggtattcctttttgttttcaagtgcagcattatattagtatttttgttatttctccataa

SEQ ID NO: 571 - DNA, 20 bp, Homo sapiens
gcactcagaaccagaagttg

SEQ ID NO: 572 - DNA, 22 bp, Homo sapiens
cagctaaatgacttgtccattg

SEQ ID NO: 573 - DNA, 580 bp, Homo sapiens
  misc_feature 535, 571, 579: n = A,T,C or G
aatgttatagagtttatttgaacaaagaaaattcatgaatcaggcagcactcagaaccagaagttgagagagctccattctgcaatatgggcaatgagtatagacaaaacaggaaagtgaagtacagaaatagcttggttggttatagctaggcatctgccttatttggacatggtctgatcagttgatcaggtttcaatttaattacttactaaggaagatcgcatagcaatggaattacagagacatccctgggcaaaatttaagttaacaatggacaagtcatttagctggctgtgcttttatttcctcatttgttgaatttgtttttgtttttgtttttttcttagcaaaaaacaaaaataggtctattgtaagagtcagataatacaatgcttgttatgatgtcatttaaatcataaggtcaaatacagggtatagggtgacgattttgggtatttggtaatgatgtgctataatgatttcctagccagtatatactgcatttacccctaaaagatggatggtgactccnccaggaaaaataatccatagaatttttggaaaatgngcccccang

SEQ ID NO: 574 - DNA, 23 bp, Homo sapiens
ttgacgatactgtggatcattgg

SEQ ID NO: 575 - DNA, 23 bp, Homo sapiens
cctgcatttcatgacatccttag

SEQ ID NO: 576 - DNA, 25 bp, Homo sapiens
tgtatctggtatcaaacaacaaagc

SEQ ID NO: 577 - DNA, 20 bp, Homo sapiens
gccctgtagcaacttggaag

SEQ ID NO: 578 - DNA, 250 bp, Homo sapiens
aaagattcagggacaaagttttattaaataccaatactggctaggcacaattagacacattattatctcatttgctgtatctggtatcaaacaacaaagcctgaaagattaccatagattttgatggcctcattaacataattaatccgtagtgacattccctggataataaatacagttttatgtccgtgtgtcttctgtgtcttccaagttgctacagggctctatttgatctgagaaactgactgct

SEQ ID NO: 579 - DNA, 20 bp, Homo sapiens
atcacaattgcccttttgga

SEQ ID NO: 580 - DNA, 25 bp, Homo sapiens
aactaatgactgcctactatgtgct

SEQ ID NO: 581 - DNA, 306 bp, Homo sapiens
  misc_feature 186: n = A,T,C or G
atcacaattgcccttttggatgtgagtgctggtctcaaaaagatttgcagttaaaagaggaacagcaaaaaagacttacaccaaaatagcaaccaactctaaaactattacaggtgagaggtagacagcttcataactcaatcttctactaccaggtgatgttaaaaaaatactttaacatcaaantcacctacaaatattcctccactttcatatgctgagcaatttcagcttagagtgactaagtgttatttatctctctatcttcggcacctagcacatagtaggcagtcattagttatttgc

SEQ ID NO: 582 - DNA, 20 bp, Homo sapiens
gctaggtgccgaagatagag

SEQ ID NO: 583 - DNA, 21 bp, Homo sapiens
ttacaggtgagaggtagacag

SEQ ID NO: 584 - DNA, 306 bp, Homo sapiens; identical to SEQ ID NO: 581
  misc_feature 186: n = A,T,C or G

SEQ ID NO: 585 - DNA, 20 bp, Homo sapiens
accttcgttcaattttcaaa

SEQ ID NO: 586 - DNA, 20 bp, Homo sapiens
atgaggtatcaggatccatt

SEQ ID NO: 587 - DNA, 141 bp, Homo sapiens
accttcgttcaattttcaaaactttgarcgtaataatttaggtagtaggaacattagatgcaatctatagaagaaatattagactcaatctatgargaacatgaatttttttacaacctataatggatcctgatacctcat

SEQ ID NO: 588 - DNA, 20 bp, Homo sapiens
accttcgttcaattttcaaa

SEQ ID NO: 589 - DNA, 23 bp, Homo sapiens
atgaggtatcaggatccattata

SEQ ID NO: 590 - DNA, 141 bp, Homo sapiens; identical to SEQ ID NO: 587

SEQ ID NO: 591 - DNA, 22 bp, Homo sapiens
ccacaaagtagctttctcacct

SEQ ID NO: 592 - DNA, 22 bp, Homo sapiens
tctaactacgtacctgggtgcc

SEQ ID NO: 593 - DNA, 459 bp, Homo sapiens
tttttttttttaaatagagatgaggttttgctatgttgcccaggctggtctcctggactcaagcaatctcccacttcaggctaccaaagtgctgggatttacaggcatgagccacctctcccagtctcagttattattttaataaatgagactgaacgtcctcttataaggctcactcccttgttcctactacatttgctctgtttaagtatctctttaaattcttcagttaagatcatcccttttatcagaaacctagacaccacaaagtagctttctcacctttaattctccatagggatcactattatactataatatttgcatacgtatgtgtatatatgtatttgcttttttagaaaagtaaaaatgctcttctcactctttgtcgatataggcacccaggtacgtagttagaaattaaataaaggccacaataatttcccaaggaagatcatt

SEQ ID NO: 594 - DNA, 19 bp, Homo sapiens
tttgtcgatataggcaccc

SEQ ID NO: 595 - DNA, 19 bp, Homo sapiens
taaggcccagctatgtgat

SEQ ID NO: 596 - DNA, 575 bp, Homo sapiens
  misc_feature 504, 531, 554, 569: n = A,T,C or G
tttttaaatagagatgaggttttgctatgttgcccaggctggtctcctggactcaagcaatctcccacttcaggctaccaaagtgctgggatttacaggcatgagcacctctcccagtctcagttattattttaataaatgagactgaacgtcctcttataaggctcactcccttgttcctactacatttgctctgtttaagtatctctttaaattcttcagttaagatcatcccttttatcagaaacctagacaccacaaagtagctttctcacctttaattctccatagggatcactattatactataatatttgcatacgtatgtgtatatatgtatttgcttttttaaaaaagtaaaaatgctcttctcactctttgtcgatataggcacccaggtacgtagttagaaattaaataaaggccacaataatttcccaagggaagatcattaaaaagaaaaatcctttcttcctctaatatcacatagctgggccttatggnatgcagctaagaaaaagggattgcctnggtgacaggaagaccaatcttcncccttggggtgtagnggaatt

SEQ ID NO: 597 - DNA, 20 bp, Homo sapiens
tgggctcaagtttccattcc

SEQ ID NO: 598 - DNA, 20 bp, Homo sapiens
gaagagctactatcaatccc

SEQ ID NO: 599 - DNA, 333 bp, Homo sapiens
accattgcactccagcctgggcaacaagagcgaaactttgtctcaaaaaaaaagatgggatagtggaaataacacagattatgacttacaacttgggctcaagtttccattccattcccttaaacttgtctgtctttgagcaaggaatccaacatctctgaactctgtttccccatcttaaaatgggattgatagtagctcttcatatgttggttggatgagtgaataaaatgatcattataaaaggcagagaatgataaattaaaaaaatgtgtaatataaataaatgacattgggggctgggcggggtggctcacacctgtaatccgacat

SEQ ID NO: 600 - DNA, 24 bp, Homo sapiens
atttagcataagaaagaagctgca

SEQ ID NO: 601 - DNA, 25 bp, Homo sapiens
gttgattaatgtaatactgagggga

SEQ ID NO: 602 - DNA, 320 bp, Homo sapiens
  misc_feature 131, 194, 246, 281: n = A,T,C or G
aatttagcataagaaagaagctgcaacaaattataaatattaaaaggttgaaaacaccataaacatcacaaaatttaatcccctcagtattacattaatcaacttcctaactcacttttatgatacctttnccctatagtttttaaattgcttatttaattacctcccttaagagaattattttgttataattnctacggcaagaactgaaaggcatttgcctttccctagtatgtttaataaaanttcattttgtattattaatagtttaggaaagaaanttcagcttcacagcttgttattgggtaatgagataaatt

SEQ ID NO: 603 - DNA, 22 bp, Homo sapiens
catcacaaaatttaatcccctc

SEQ ID NO: 604 - DNA, 22 bp, Homo sapiens
catactagggaaaggcaaatgc

SEQ ID NO: 605 - DNA, 320 bp, Homo sapiens; identical to SEQ ID NO: 602
  misc_feature 131, 194, 246, 281: n = A,T,C or G

SEQ ID NO: 606 - DNA, 20 bp, Homo sapiens
caaaatttaatcccctcagt

SEQ ID NO: 607 - DNA, 20 bp, Homo sapiens
agggaggtaattaaataagc

SEQ ID NO: 608 - DNA, 101 bp, Homo sapiens
  misc_feature 63: n = A,T,C or G
caaaatttaatcccctcagtattacattaatcaacttcctaactcacttttatgatacctttnccctatagtttttaaattgcttatttaattacctccct

SEQ ID NO: 609 - DNA, 23 bp, Homo sapiens
caaaatttaatcccctcagtatt

SEQ ID NO: 610 - DNA, 23 bp, Homo sapiens
agggaggtaattaaataagcaat

SEQ ID NO: 611 - DNA, 101 bp, Homo sapiens; identical to SEQ ID NO: 608
  misc_feature 63: n = A,T,C or G

SEQ ID NO: 612 - DNA, 20 bp, Homo sapiens
ttctggagctcgttgttgtg

SEQ ID NO: 613 - DNA, 20 bp, Homo sapiens
tgcttgtcattgggaaaaca

SEQ ID NO: 614 - DNA, 1850 bp, Homo sapiens
gggcgccaacagttggaatttgaagaggctgagaactcagctctggaaccaaaatctgctggtgactggtggactcatgcatggtttctggagctcgttgttgtggtgaaccatgatttcttcatttactctcaaagcaacatctcaaaggtgcaagaggatgtatttcttgttgtcaacatagtggattccatgtataagcagttaggtacttacataattttgattggaattgaaatttggaatcaaggaaatgttttcccaatgacaagcatagaacaggtcctgaacgatttctctcaatggaaacaaatcagtctttcccagctacagcatgatgctgcacatatgttcataaaaaattcacttataagtatacttggcctagcctatgttgcaggaatatgtcgtccacctattgattgtggagttgataattttcaaggagatacctggtctctttttgccaacactgtggcccatgagttaggttatacgttgggtatgcagcatgatgaagaattctgtttttgtggggaaagaggttgcatcatgaatacttttagagtgccagcagagaaattcaccaattgcagttacgctgattttatgaagaccaccttaaaccagggatcatgtctgcataatcctccaagattgggggaaatctttatgctaaagcgctgtgggaatggtgtggttgaaagagaagagcagtgtgactgtggatccgtacagcagtgtgaacaagacgcctgttgtctgttgaactgcactctaaggcctggggctgcctgtgcttttgggctttgttgcaaagactgcaagttcatgccatcaggggaactctgtagacaagaggtcaatgaatgtgaccttccagaatggtgcaatggaacatctcatcagtgtccagaagatagatatgtgcaggacgggatcccctgtagtgacagtgcctactgctatcaaaagaggtgtaataaccatgaccagcattgcagggagatttttggtaaagatgcaaaaagtgcatctcagaattgctataaagaaatcaactctcagggaaaccgttttggtcactgtggtataaatggcacaacatacctaaaatgtcatatctctgatgtcttttgtgggagagttcaatgtgagaatgtgagagacattcctcttctccaagatcattttactttgcagcacactcatatcaatggtgtcacctgctggggtattgactatcatttaaggatgaacatatctgacattggtgaagtgaaagatggtactgtgtgtggcccaggaaagatctgcatccataagaagtgtgtcagtctgtctgtcttgtcacatgtctgccttcctgagacctgcaatatgaaggggatctgcaataacaaacatcactgccactgtggctatgggtggtccccaccctactgccagcacagaggctatgggggcagtattgacagtggcccagcatctgcaaagagaggagtttttttgccgctgattgtgattccttctttgtctgttttgactttcctgtttactgtcgggcttcttatgtatctacgacaatgttctggtcccaaagaaactaaggctcattcatcaggttaagaaaatgtctctaacttaatattccatgcattagtacactttagtctcttggcagtagaaacattagtacatccctgaaactgagcacatttctgaccatttccagaaagctgcaaagatcttcccttacattagtactacaaacattgtcattaagttcaagttattcttaacatgtttctatctactgtttattgttttaagcagcaaataaagctccc

SEQ ID NO: 615 - DNA, 20 bp, Homo sapiens
ttccccccaaagaaaacttc

SEQ ID NO: 616 - DNA, 20 bp, Homo sapiens
acggtttggaaaactcatgc

SEQ ID NO: 617 - DNA, 287 bp, Homo sapiens
  misc_feature 40: n = A,T,C or G
cccaagtgaggctgttcatttagtataacaggaactgggntctctctactttccccccaaagaaaacttcaaaaaactctgttcttcacaaagtcttctttgttctttgagcacctattgaaaaagctgactggagactgtctcagtctattcaattctccctgtgatcctccactatggactttctttcaaactgtgtcttattgttattaacccttactgttttcataacagtttaggcacagaactgacatgacatccctttgcatgagttttccaaaccgtgg

SEQ ID NO: 618 - DNA, 22 bp, Homo sapiens
ttgtgcttttggaatatgttgc

SEQ ID NO: 619 - DNA, 20 bp, Homo sapiens
ccgtcctgcacatacacatc

SEQ ID NO: 620 - DNA, 2442 bp, Homo sapiens
cagatggctccataatgacagcttcataatggcagtgggtgagcccctggtgcacatcagggtcactcttctgctgctctggttggggatgtttttgtctatttctggccactctcaggccaggccctcccagtatttcacttctccagaagtggtgatccctttgaaggtgatcagcaggggcagaggtgcaaaggctcctggatggctctcctatagcctgcggtttgggggacagagatacattgtccacatgagggtaaataagctgttgtttgctgcacaccttcctgtgttcacctacacagagcagcatgccctgctccaggatcagcccttcatccaggatgactggtactaccatggttatgtggagggggtccctgagtccttggttgcccttagtacctgttctgggggctttcttggaatgctacagataaatgaccttgtttatgaaatcaagccaattagtgtttctgccacatttgaacacctagtatataagatagacagtgatgatacacagtttccacctatgagatgtgggttaacagaagagaaaatagcacaccagatggagttgcaattgtcatataatttcactctgaagcaaagttcttttgtgggctggtggacccatcagcggtttgttgagctggtagtggtcgtggataatattagatatcttttctctcaaagtaatgcaacaacagtgcagcatgaagtatttaacgttgtcaatatagtggattccttctatcatcctttggaggttgatgtaattttgactggaattgatatatggactgcatcaaatccacttcctaccagtggagacctagataatgttttagaggacttttctatttggaagaattataaccttaataatcgactacaacatgatgttgcacatcttttcataaaagacacacaaggcatgaagcttggtgttgcctatgttaaaggaatatgccagaatccttttaatactggagttgatgtttttgaagacaacaggttggtcgtttttgcaattactttgggccacgagcttggtcataatttgggtatgcaacatgacacccagtggtgtgtgtgcgagctacagtggtgcataatgcatgcctatagaaaggtgacaactaaatttagcaactgcagttatgcccaatattgggacagtactatcagtagtggattatgtattcaaccgcctccatatccagggaatatatttagactgaagtactgtgggaatctagtggttgaagaaggggaggaatgtgactgtggaaccatacggcagtgtgcaaaagatccctgttgtctgttaaactgtactctacatcctggggctgcttgtgcttttggaatatgttgcaaagactgcaaatttctgccatcaggaactttatgtagacaacaagttggtgaatgtgaccttccagagtggtgcaatgggacatcccatcaatgcccagatgatgtgtatgtgcaggacgggatctcctgtaatgtgaatgccttctgctatgaaaagacgtgtaataaccatgatatacaatgtaaagagatttttggccaagatgcaaggagtgcatctcagagttgctaccaagaaatcaacacccaaggaaaccgtttcggtcactgtggtattgtaggcacaacatatgtaaaatgttggacccctgatatcatgtgtgggagggttcagtgtgaaaatgtgggagtaattcccaatctgatagagcattctacagtgcagcagtttcacctcaatgacaccacttgctggggcactgattatcatttagggatggctatacctgatattggtgaggtgaaagatggcacagtatgtggtccagaaaagatctgcatccgtaagaagtgtgccagtatggttcatctgtcacaagcctgtcagcgtaagacctgcaacatgaggggaatctgcaacaacaaacaacactgtcactgcaaccatgaatgggcacccccatactgcaaggacaaaggctatggaggtagtgctgatagtggcccacctcctaagaacaacatggaaggattaaatgtgatgggaaagttgcgttacctgtcactattgtgccttcttcctttggttgcttttttattattttgcttacatgtgctttttaagaaacgcacaaaaagtaaagaagatgaagaaggataagagaaatgggaaaaagaaggagactaaactttatacttcatttttaatatccaattttttaatagaaaaatatgaagccatgtctcactgtttaaataaaacttcatggacatttcatgtcaggattgcaagcattagctatcacagcaaaggattcctagcctattcttacttactttacagtgtcttaagcaatattaaaggttccttttcccaaaaaaaaaaaaaaaaaa

SEQ ID NO: 621 - DNA, 20 bp, Homo sapiens
agtgtcagcagggatatggg

SEQ ID NO: 622 - DNA, 20 bp, Homo sapiens
tgatgcgtctacaagccaag

SEQ ID NO: 623 - DNA, 396 bp, Homo sapiens
ttcggacttaaacaataaatttattgtctcaaaattctggaggctgaaaatccaaaatcaaagtgtcagcagggatatgggctatgctttctctgaaacctgtaggggaatccttctttgcctcttagcttctggtgactggccggaaatctttggcattccttggcttgtagacgcatcactccgatcctccatcttcacatggcattctccctttgtctcttcacacagctttccttttataaagacaccagtcatatcagataagaggcccactctactccagtatggcctcatcttaacccataacatctgcaattaccctgttttcaaatgaggtcacattctaaggtactgggggttaagatttctgtataccttgtttgaagaagatga

SEQ ID NO: 624 - DNA, 20 bp, Homo sapiens
tatggtaaccacgaggcaca

SEQ ID NO: 625 - DNA, 20 bp, Homo sapiens
aatgtgagccacaaatgcaa

SEQ ID NO: 626 - DNA, 326 bp, Homo sapiens
acacctagacatgtgctgtccagtatggtaaccacgaggcacatgtgactattagcatttgaaacacagctagcccagattgagttgtgatgtaagtgcagtatacatactggatttcagacttgtatgaaaaagaatgtatgtaaaatatctcagtagtttaaaaatattgattatatgttgaaataatattttaggtatatttggttaaataaaatacatgtttctttttaaaaatgtgacaagaaaatttaaaattacatgtatagcttgcatttgtggctcacatttcttttgaacagtcgtgatctagaaaacggtaatag

SEQ ID NO: 627 - DNA, 23 bp, Homo sapiens
gggacaggacttaagaatttggg

SEQ ID NO: 628 - DNA, 23 bp, Homo sapiens
gcttgagaatctgaggctttctg

SEQ ID NO: 629 - DNA, 561 bp, Homo sapiens
gacttctgccttgatcgtctgtgatcgtcaagaaaacaaattctgatgctgtagagttgtgcttttgagtgtctcttaattttaaaagctccccgggtgtatccactgagctatcagatttaggaacgatggtcatttatatttttctccctgcctcaggtattgggatgggacaggacttaagaatttgggagtcattggcttttatgtgactaaatccattaaaaatctaaaccaattaaagaagcctctgagaaaaatttcacaacacaggaaatgcttctgaagtgaaatattaataagattaagagaaagggaatacccctgggtcccagagtaatgagcaaatgtctgcattccaagtagtctggagtaggtagcaaggctccaaagagggaatgattctgtgtacggggaagctacagaaagcctcagattctcaagcttcagtgtggctctgtaaaagcaaaacgatacagaaatatgcaaacaacacacagatactaggaagaggatgccaaaatctgaaggagggatgagggcgggtgcctacatcttctc

SEQ ID NO: 630 - DNA, 20 bp, Homo sapiens
agcacttggccaaataggtg

SEQ ID NO: 631 - DNA, 22 bp, Homo sapiens
ccaggagaactttaaagacctg

SEQ ID NO: 632 - DNA, 413 bp, Homo sapiens
gatcagagtttcatataaatttatgaggaacaagacaatgaccaaaaaaatctacatataaccaacagcagagccagtcttagcacttggccaaataggtgctgccaagtagatagaatttgagagttaaaagttccaattacccttaattagcctgaaattttaccattagagattaatgtcattgaatcttatagcatcaggtctttaaagttctcctggaagggattatatcttaaaatagtatttataataggattatgacagaagacaaaaatctaactaatgaatggttcatctgaagagacttttgatacaaagactatttatataagtgtgggcatggttaaagaaacccaagaaaagaatgttgaagtatccagagattagcaagagagggaagatattttggc

SEQ ID NO: 633 - DNA, 21 bp, Homo sapiens
ttgcgtatcttgttttccagg

SEQ ID NO: 634 - DNA, 21 bp, Homo sapiens
tacactgaacattccaaggcc

SEQ ID NO: 635 - DNA, 706 bp, Homo sapiens
  misc_feature 505, 507, 520, 540, 549, 552, 558, 587, 594, 625, 645, 660,678: n = A,T,C or G
gatctcggccgagttgtgtgctgggcccttgggtgtgatttttgcgtatcttgttttccaggaaattcaaagaaataggtagggatcgttctgtttctacggaattttgaatgatcctgatacaatgattagaaaagatatcctgaccttcctggggagacataggaatctgatctttacagaggctacaaaggaagcatgtattggcctgttgatggactcttcttgacattgaacaagacacaggactcccctggggccttggaatgttcagtgtagaaccctttgaagggcagatctttttgccctacatctgttcctgtggggctgtggtggccctagcagaagtgtgatcaaagggatacaacacacaataactttgttggtattttcaaatgatgttcaagggctcgaatgccaagcagtagagatggaaatcaacaaaccatgggcatttggacctgaagggctaggagcttgtggcctctggtccctggggataccntngtgaaccttgggntaagccccctggccattttnacctttacntcnattttncccatctactcagagctatgtttaggggnatttttngtttgatcttaccaaaagggggcagctaatntcccattggatccccaattngaagcccttgggganaggggatttgggcaaggncctagaagggaagtcacactggggaatt

SEQ ID NO: 636 - DNA, 21 bp, Homo sapiens
caggaaggagatgatagagga

SEQ ID NO: 637 - DNA, 23 bp, Homo sapiens
agctttacttgtacccagtatgt

SEQ ID NO: 638 - DNA, 319 bp, Homo sapiens; identical to SEQ ID NO: 32
  misc_feature 290, 296: n = A,T,C or G

SEQ ID NO: 639 - DNA, 21 bp, Homo sapiens
ggtgaccacacataccattcc

SEQ ID NO: 640 - DNA, 18 bp, Homo sapiens
attgctttggggaaagcc

SEQ ID NO: 641 - DNA, 550 bp, Homo sapiens
ctggtgaccacacataccattcccccggactcccacccaagcaggcagctgtgaccgcagaagggcaggatgaagtgggccaaggtttgggacaggttgactgtgtaggtgacagggagggaaagatgatggccaggggaaagagcatcgtataggctaggggattgaactgtggactgattcagtgtaaataaaaacaaattaacaggtagtagttcctgtcagttctgttggaagcagcccactccctcacttttactccttcctccaaccctcaatcagagctacttacagccaggcaggatggggctttccccaaagcaattggccgtttgtccagtggcagacaatggtggctacagcctttgtgcttttaagagtgggctgggattgtggagactgcccaggggcttggctttgtcagaacttgtacaatcttcttttgatgaaattatctgaactcaacatctagcacatagaatgtgttcaacaaatgcttgttgaatgaataaattatgactgcaagactgggctctcctgccttaaacta

SEQ ID NO: 642 - DNA, 24 bp, Homo sapiens
tcatatgcatttcttaacccttcc

SEQ ID NO: 643 - DNA, 20 bp, Homo sapiens
tgtgctcgttatgctatgcc

SEQ ID NO: 644 - DNA, 314 bp, Homo sapiens
  misc_feature 58, 60, 118, 142, 233, 276: n = A,T,C or G
gaagataatgcatttaataaatcctaactattcacattattgcatctgtatatatttnanttttgtacaacattgtctttttcactagtcacacgaaaaatacatgaaagtgctctgntaattttaaagcatcatataaatnaaaggtgtcattggtaataatctcatatgcatttcttaacccttccatttccttgaagactgagacgacatcccatgtcccacagcatatngcacaatgatgggcaaacaatatgccctcagtaagtgtttctngtttgactgaggcaacatggcatagcataacgagcaca

SEQ ID NO: 645 - DNA, 18 bp, Homo sapiens
taacccttccatttcctt

SEQ ID NO: 646 - DNA, 21 bp, Homo sapiens
aaacacttactgagggcatat

SEQ ID NO: 647 - DNA, 314 bp, Homo sapiens; identical to SEQ ID NO: 644
  misc_feature 58, 60, 118, 142, 233, 276: n = A,T,C or G

SEQ ID NO: 648 - DNA, 23 bp, Homo sapiens
gtacaacattgtctttttcacta

SEQ ID NO: 649 - DNA, 23 bp, Homo sapiens
tatgagattattaccaatgacac

SEQ ID NO: 650 - DNA, 105 bp, Homo sapiens
gtacaacattgtctttttcactagtcacacgaaaaatacatgaaagtgctctgataattttaaagcatcatataaattaaaggtgtcattggtaataatctcata

SEQ ID NO: 651 - DNA, 20 bp, Homo sapiens
gtacaacattgtctttttca

SEQ ID NO: 652 - DNA, 20 bp, Homo sapiens
tatgagattattaccaatga

SEQ ID NO: 653 - DNA, 105 bp, Homo sapiens; identical to SEQ ID NO: 650

SEQ ID NO: 654 - DNA, 19 bp, Homo sapiens
tgtgcgtcaggaaggactc

SEQ ID NO: 655 - DNA, 21 bp, Homo sapiens
gctgtcttcatttcgttctgg

SEQ ID NO: 656 - DNA, 476 bp, Homo sapiens
gatctgacggatgaagagaagggtagaggtcacctggagaatgagttcaaactgccagggtcttcccttggtctttgtgcgtcaggaaggactccgagtaattattccctatgcagagacaggagagaggtcttgtttacatgagtgtgctggggcagggctggacaatccaggatatgattgtagccatcccatgtagaaagatcaaaaaccagaacgaaatgaagacagcctctcagaacctcatagaacaagcgtccaggtcatctgcttgtttggtgacttagatatacaaggcttactgggactccattcactgtgacctgaagttaaataatcccaaagagaaaaagctacctggggtaattggttgatgtttggggtgataagggctgaattttctgtgcaatttgtccaaacaaagggctttatagcacaaaatccaggttcaattctcccctaacaaaatcttcaag

SEQ ID NO: 657 - DNA, 21 bp, Homo sapiens
cacatgtctataacgatttcc

SEQ ID NO: 658 - DNA, 21 bp, Homo sapiens
tgcaggaaacagggtactctc

SEQ ID NO: 659 - DNA, 5217 bp, Homo sapiens
ctcggggccacggtccccccgcagcgctagtcccgggcccgcgagcaccggcccccgccacccgcaggttgcggagggaggagggcgggagcgggcggcgcggagccgggaggcgggggaggggccggcgtccgaggcggcggcggcggcggctggagcagcctctggcagcagcggggagaatgggagtgcggggcgccagaccgccgcggggtgtcacggccgccacgaagcctgcgaggcgcggggccggcgcccgcggcttttaaacccgggaaggcgcggcggcggcggcggcggcgggcagatcgcggcgcgcaccaggcgccggggcggcggccgaatggagagaaagggctcggcggccggggccaaggggaacccgagcccgcccgcggccggagaggggcagcggccaccgccgccgctgtgcgtcccgggcggcggcggaggagccccagcgaggggccaggtcggggcggcggccgagccggccgagctcatccgacgagcgcacgagttcaaaagccaaggggcgcagtgctacaaggacaagaaattccgtgaagccataggcaaataccaccgggcgttgctggagctgaaggggctgctgccgccccccggggaacgggagcgggactcgcgcgcggcctccccggctggggccctgaagcccggccgcctctcggaggagcagagcaagacggtggaagccatcgagatcgactgttacaacagcctggcagcctgcctgctccaggctgagctggtaaactatgaacgagtcaaggaatattgcctcaaagtcttgaagaaggaaggggagaacttcaaggccctttaccggtctggtgtggccttctaccaccttggggactatgacaaagcactctactacctgaaagaagcaaggacccaacaaccaacagacaccaacgtgattcggtatatccagctgacggagatgaaactcagccgatgctcccagagagaaaaagaagccatgtaaccaggaagcagctccagagctgcgcccacgcctgaccggggacttccaggcatcccctggcagagagccccgtcctggattctgtccctttctccccacttcttctggctcctcatttttcctcctgttgcaccccagctctttgtctcctcccagtacgaaaaggagagatgcaaatttggaatctggtaggtcgcccagacaatggagacatcctctcctctagcaggtcagcgactgagaggggcctgacttctgctgggacagctggagaggagtctcatgggctgggatgctgttgtggctttgactttggccagtgcttctgacagaggcggagcctggcaagtgtaccatcccacaggcagcaggcacacagcccatgggctggatccttccacactttcctgacagaccagaaccagagcatctcgaggcaactgttagaaatccagggacgagacaaacagagaagcgctggtgaagccaacatagagactgtcaatgtgtacactggagttcccacccccaccccccacccgtcacttagcccctgcctccttcccccactcgttgtcttggcttgtgctttctcctctccccatcggggatccgagactctgccaggattcacatgccactgaagcccactcagtgccctctggtgaccacacataccattcccccggactcccacccagcaggcagctgtgaccgcagaagggcaggatgaagtgggccaaggtttgggacaggttgactgtgtaggtgacagggagggaaagatgatggccaggggaaagagcatcgtataggctaggggattgaactgtggactgattccgtgtaaataaaaataaattaacaggtagtagttcctgtcagttctgttggaagcagcccactccctcacttttactccttcctccaaccctcaatcagagctacttacagccaggcaggatggggctttccccaaagcaattggccgtttgtccagtggcagacaatggtggctacagcctttgtgcttttaagagtgggctgggattgtggagactgcccaggggcttggctttgtcagaacttgtacaatcttcttttgatgaaattatctgaactcaacatctagcacatagaatgtgttcaacaaatgcttgttgaatgaataaattatgactgcagactggctctcctgccttaaactaatttcatcccagcctagtctcctgatgtctgtgctcgttatgctatgccatgttgcttcagtcaaacaagaaacacttactgagggcatattgtttgcccatcattgtgcaatatgctgtgggacatgggatgtcgtctcagtcttcaaggaaatggaagggttaagaaatgcatatgagattattaccaatgacacctttaatttatatgatgctttaaaattatcagagcactttcatgtatttttcgtgtgactagtgaaaaagacaatgttgtacaaaattaaaatatatacagatgcaataatgtgaatagttaggatttattaaatgcattatcttcagatctttacatgtataatctcatttctttcatgcagttactctgggatactgttcccatttgatgggtaagaatattgaaaaccagaaaaattaattatcccaaggttgcatggcctttagtggcatagctaggatttgaaccaggcctgcctgactccagagctctggctagtatctatgctatacttagttgcctctctataagtataatattgggcaattataaccatttgagaacaggacaatatgtattaacctgaaaagtgttcatgatgtcagtgatagtacatggcctccttatgtatttactcaagggccccaaaagaccagaggccagaatccctagtagtcagagcagtgacaggtcagaaaaaggcagctgaggtccaatagttatgtctgtgtattgctcattctacttactgatggagccagcatgtatctcaacaactcacctagcattcatcacccatccccagcattgggaaagggtcacaattaagaccgaaaggaaacacaaagttaaatatgggttaattatgtaagcagatgccccaccacggcaggatccaatcacagccgaggggcccagaagagagcagcgtaagttatattcacatagttccccaaaggctttcaacgggggctacaggaaggtgctagaaatattgaggggcctgccattactcacctagagctcactctctggagaagaggaaaaggaagaagctatttccgctgccacattctccccaatccctactatattatgctgtctttcctcttcctcctagctggctttacatgaccctaacccaaaactaccctatggccccacacgggaatgtgttcaaacgccccgacccccacccccacccccattcccaagcctccaacttagaacgtttgtgatttggcagatggtttgttaggatctgaaggatgaagagaagggtagaggtcacctggagaatgagttcaaactgccagggtcttcccttggtctttgtgcgtcaggaaggactccgagtaattattccctatgcagagacaggagagaggtcttgtttacatgagtgtgctggggcagggctggacaatccaggatatgattgtagccatcccatgtagaaagatcaaaaaccagaacgaaatgaagacagcctctcagaacctcatagaacaagcgtccaggtcatctgcttgtttggtgacttagatatacaggcttactggaactccattcactgtgacctgaagttaaataatcccaaagagaaaaagctacctggggtattggttgatgtttggggtgatagggctgaattttctgtgcatttgtccaacaaaggctttagagcacaaaaccaggttcattctccctaccaaatcttcagcttccttctcctcatccctccccaaaacaagaactgtgatttaattccgtacgttgcggatgtcactgctgacctatgtagctggagtactaatcaggcatctgacctgcactgtcatcccctgcctggacttttgcgatggactctttgggggaaaaactaacgctttttaattattgtgaaagcatcatgtgtgtattgtagaagttttaggaaaaaaaggacaaaatccaatccataagcttaccacccaagacaaacgtgtattcttttgaatataccttttagttctttttggtgtaaatgtacacacgcacacacagttgtggatttttttaaacaaaaactggatacactgaatatactctttaataacttttcaagtgtgtatttatattttagaatatgtaatcctacacagatacaaaattcaaaaagtacaaactgctctgtagtcagaagtaaatcttctccctaccccgtctgccagcatctagtttccctctaatttattttgcatcctagtggagatgcttacacattgtcaaacatatgtatatattcttttatcacacacaaatggcagcatattggacactttttgttttttgctccttctgttccttcacttaataatatcacgaacattttcggcatatcaaactttctcaacagcatcttcattgtatggatggaccctttttttatcatcaatcctcaaatagtgattatttcatttgttcccaatcttcattgtaaatagtgttgcaactgacattcttgtagctaaattttgcacatgtctataacgatttccttaggataaactccaagaagagacttgcttggctatttttaagaattttgatacatgttgccaaccaccctccagaaagtttgtaccaaaacgctctcctatttggatcctagagagtaccctgtttcctgcaccctaacactaggtatcatcacttatcaaatctttcccaatttggtagctgggataatagtatgtcaatgttattttaactttctttgattcttcgcgaataacattttcatatgcttattgaccatttgtacttctttctttgtgaattttctatttatttgatattggtatgtttattatcaatttgtaattttattaagaatattatttttgtcaagaaatgctgcaaatatgctttccaagtgctttgctttcaaattttgtttatggtgctttttgacatacataaattcttaattctgc

SEQ ID NO: 660 - DNA, 20 bp, Homo sapiens
ttatgtatgtcaaaaagcac

SEQ ID NO: 661 - DNA, 20 bp, Homo sapiens
gggataatagtatgtcaatg

SEQ ID NO: 662 - DNA, 242 bp, Homo sapiens
ttatgtatgtcaaaaagcaccataaacaaaatttgaaagcaaagcacttggaaagcatatttgcagcatttcttgacaaaaataatattcttaataaaattacaaattgataataaacataccaatatcaaataaatagaaaattcacaaagaaagaagtacaaatggtcaataagcatatgaaaatgttattcgcgaagawtcaaaggaaagttaaawtaacattgacatactattatccc

SEQ ID NO: 663 - DNA, 20 bp, Homo sapiens
ttatgtatgtcaaaaagcac

SEQ ID NO: 664 - DNA, 23 bp, Homo sapiens
gggataatagtatgtcaatgtta

SEQ ID NO: 665 - DNA, 242 bp, Homo sapiens; identical to SEQ ID NO: 662

SEQ ID NO: 666 - DNA, 20 bp, Homo sapiens
aagcaaagcacttggaaagc

SEQ ID NO: 667 - DNA, 20 bp, Homo sapiens
ttgattcttcgcgaataaca

SEQ ID NO: 668 - DNA, 20 bp, Homo sapiens
tggctgctaatacttgcacg

SEQ ID NO: 669 - DNA, 20 bp, Homo sapiens
tccaactgattgctgtggag

SEQ ID NO: 670 - DNA, 284 bp, Homo sapiens
  misc_feature 65, 151, 186: n = A,T,C or G
gcttgcacagaataagcacagaaaaaacatttatttccttcccccaccctccctggcctcagttnccttgtttatagtgtggctgctaatacttgcacgttcaccttccacattccccctctctgcactgtagaaggaagggaaccttcanagaggcccttgggttactctctgctcaagcaggcncaagtacttggaggtggggagtagaaagacagaggaagcttcatactccaacccatgcctctccaggcttcaaagagactccacagcaatcagttgga

SEQ ID NO: 671 - DNA, 22 bp, Homo sapiens
ggctgtattgtaaactctttcc

SEQ ID NO: 672 - DNA, 20 bp, Homo sapiens
gtgagaccatgtgtcttccc

SEQ ID NO: 673 - DNA, 421 bp, Homo sapiens
gccattgcactccagcctggcaataagagtaaaactccatctcaaaaaaaaagagcattcaaggtgcacttcttttccttgcccttggctgtattgtaaactctttcctctggctactaactggtgagagatcagtgggttatgaacactatcatatgcctgtcatcaaggatgcaaaagtggggaagacacatggtctcactggtgtgacagccatgtgcctgtaatcctagttacttggaaggataaggcaagtagattgcttgagctcgggtgtttaagaccagtctgggcaacatagtgagaccctcatctaaaaaaaaaaataggaatagtgccagccaggcacagtggctcatgcctgtaaccccaacactttgggagggtgagttagggagtatttttttttttttttttgggg

SEQ ID NO: 674 - DNA, 21 bp, Homo sapiens
caagagagataggtgaattgc

SEQ ID NO: 675 - DNA, 19 bp, Homo sapiens
tgacggaagcgtgatgagc

SEQ ID NO: 676 - DNA, 314 bp, Homo sapiens
  misc_feature 45, 48, 50, 55, 56, 57, 62, 116, 117, 164, 165: n = A,T,C or G
gccattgcactccagcctgggcaatagagggagattccatctcanaananaaaannnttttnttatcggagatatttacatctgtggactttggctccatcagagtcctcattttnncaaatggagcctcctatacatcaagagagataggtgaattgcatttnnctaaaatggcatgatgacagagaggatgccttccagctagactagcaggcctgggctaggaaagctcatcacgcttccgtcaacaggcctcacttctgagctggagatgctcatctcggaggccaaggagtgagtcaacagaatgagga

SEQ ID NO: 677 - DNA, 20 bp, Homo sapiens
tcccaagcaactggaactac

SEQ ID NO: 678 - DNA, 22 bp, Homo sapiens
ggggatacaaacattcagtacc

SEQ ID NO: 679 - DNA, 604 bp, Homo sapiens
gatctcctacttcagcctcccaagcaactggaactacaggcatgcaccaccatgcctggctaatttttttcttctcttttttcttttgtagagaaagagtcttgctgtgttgcccaggctggtctcaaactcctgggctcaagaaatcctcccgcctcagcctcccaaagtgttgggattacaggtatgagccattgcacctggcccaaaaatatctttagttatgtggcaaagtgcccagctgaaccttctgttatcacagatcagagaacaaatattgggaaatgttaggtactgaatgtttgtatccccactaaaattcatatgttgctggcatttggagataggacctttgggaattaattattgtcagatgaggtcatgagggtgaaacccttctctgataggattagtggtccttataagaagagacatctgctggactcagtggctcatgcctgcaatcccagcactttgggaggctgaggcaggcagattgcttgaagtcatgagttccagaccagcctgggcaacatggcaaaaccccatctctaacaaaaaatacaaaaaattttgtcaaggcatggtggtcacatatatgtag

SEQ ID NO: 680 - DNA, 20 bp, Homo sapiens
tttagccattgaaccaagcc

SEQ ID NO: 681 - DNA, 20 bp, Homo sapiens
gaaatcccactttgctttgg

SEQ ID NO: 682 - DNA, 299 bp, Homo sapiens
  misc_feature 178, 199, 224, 267, 291: n = A,T,C or G
aatcgttataacagttttattcaagtctctgtgtgctctggcattgagaccaggctgagatcagcattacactgtaatacaataagaggtttagccattgaaccaagcctgcttggcatccctagttaacaatttacagtacctcgaaagaaaaaaaaaaaaaagccaaaggaaagancctggtaagtttccttcaggnctttttcatctttaaatattgttgncaacatacaataacttaaatcccaaagcaaagtgggatttcanggacacggggtcagggcacatgancaagacac

SEQ ID NO: 683 - DNA, 20 bp, Homo sapiens
agtctctgtgtgctctggca

SEQ ID NO: 684 - DNA, 23 bp, Homo sapiens
ggcttttttttttttttctttcg

SEQ ID NO: 685 - DNA, 250 bp, Homo sapiens
  misc_feature 195: n = A,T,C or G
ttttttttttaatcgttataacagttttattcaagtctctgtgtgctctggcattgagaccaggctgagatcagcattacactgtaatacaataagaggtttagccattgaaccaagcctgcttggcatccctagttaacaatttacagtacctcgaaagaaaaaaaaaaaaaagccaaaggaaagaacctgggnaagtttccttcaggactttttcatctttaaatattgttgacaacatacaataact

SEQ ID NO: 686 - DNA, 22 bp, Homo sapiens
ctcctatttaaatgcgagcacc

SEQ ID NO: 687 - DNA, 22 bp, Homo sapiens
gcacccctttaaattttaaccc

SEQ ID NO: 688 - DNA, 241 bp, Homo sapiens
aaacgtcctagatgtttcattcgtgtaaccgtacacactcctatttaaatgcgagcaccgccagagagccactgcctcactcaggacctgaggggaagggcaagtaaaaatttaaaacgtatttcacagtggtacctaagcccctctcacaggtccaggtgaggggcaggcagggctgggtatagagtggagtgaggccctcaccttgggttaaaatttaaaggggtgccaaaaaaaaaaa

SEQ ID NO: 689 - DNA, 20 bp, Homo sapiens
gctgaaatcctgccgattaa

SEQ ID NO: 690 - DNA, 20 bp, Homo sapiens
gcctgcacggctaaccataa

SEQ ID NO: 691 - DNA, 400 bp, Homo sapiens
cttctgtcggatcagcgtattcctagattaggaattcaaattaatgaaaattcacatatgaaaggaaaatccattgctatttctggagaggacctcagtcctgggcttttccctggcattgctacctgggtgggtgctcaccactcaggtgctggtgttggaaggcaggaggaggaagctgaaatcctgccgattaaggctaattaacagggtttaggtgcctaattatcatgactcagcccgggacttatggttagccgtgcaggccaggtgagtctcttatggacttcctctcagactgctctttctcattttgtcctgatgagatattgacagtcatgtccacccgcttcctcatccatttcccgtctttgggccctgggaagtacgggggcctctg

SEQ ID NO: 692 - DNA, 22 bp, Homo sapiens
ggaagtccataagagactcacc

SEQ ID NO: 693 - DNA, 18 bp, Homo sapiens
aggaggaagctgaaatcc

SEQ ID NO: 694 - DNA, 400 bp, Homo sapiens; identical to SEQ ID NO: 691

SEQ ID NO: 695 - DNA, 21 bp, Homo sapiens
ataataagccaaatctggacc

SEQ ID NO: 696 - DNA, 19 bp, Homo sapiens
ctgtctttaaaccaggggg

SEQ ID NO: 697 - DNA, 275 bp, Homo sapiens
  misc_feature 45, 164, 187, 197: n = A,T,C or G
ggaacctaacacactctttgccatatttggggcatcattgttttnctttagtccacacttcccaaggaagggtttttttttcaaagtataggtcctaaggaaacttgccatatactttataataagccaaatctggaccaattttatctttgctacagtatttncttaaaaaaaaaactcacacatncatgtaagtntgtgtgtgtgtgtgtgtgtgtgtgtgaacatacacctatatgtgaatgaattagtccccctggtttaaagacagattt

SEQ ID NO: 698 - DNA, 20 bp, Homo sapiens
cccctagctacatcccttag

SEQ ID NO: 699 - DNA, 19 bp, Homo sapiens
gtgtccctagcagtcagtg

SEQ ID NO: 700 - DNA, 271 bp, Homo sapiens
  misc_feature 52: n = A,T,C or G
accactgcactccagcctgggcgacagagcgagactgtctcaaaaaaaaaanaaaaatggtaaaagaaattaaccaaatctataaagacttctctcttgcccctagctacatcccttagatttagtcctgcccctatataagcaatatagttgcatgtgactggcttcacctgtgtgtacactgactgctagggacacactgagggaacagaaaggggccatttagggaatggccaccaaaacaaaaaagcagatctctggtaggctagga

SEQ ID NO: 701 - DNA, 19 bp, Homo sapiens
ttcctagggctgctgtagc

SEQ ID NO: 702 - DNA, 19 bp, Homo sapiens
gcccacatcactttcaggc

SEQ ID NO: 703 - DNA, 329 bp, Homo sapiens
gccattgcactccagcctgggtgacagagagagaccctgtctcaagaagtaaataagcatgtaagtcagtggtttttagtatatttaaaaggtgtgtatgggtcaccattgttattagtttcctagggctgctgtagcaaattactaaacctagtggcttaaagcaacagaagtgcgtgcttttatagttcctgaggccagaagcctgaaagtgatgtgggcagggcacaccctccagagactctagtgaagataatgactcaaataaggattctgggtattgggacatagatatagcttttttaggggccaccattcagcccattaca

SEQ ID NO: 704 - DNA, 21 bp, Homo sapiens
catctcagaacaaggaggctg

SEQ ID NO: 705 - DNA, 20 bp, Homo sapiens
agcaatcctggcagcatatc

SEQ ID NO: 706 - DNA, 425 bp, Homo sapiens
  misc_feature 164: n = A,T,C or G
gatcattgtcctcatggtccaagatggtagctagacctccagctatcacattcactttccagaatagcacagtgtataaagggatgaagaacaaagtccaaaggcctagagctggaatcttttaagacaggttacagaaagcacctacaatgtcactctcgaanaacctggctacatctcagaacaaggaggctggaaaatgtattaaatgtctgagtggcctggtgcccatcttgcaattgtgggttccattactatgggaggaggggagaataaccactgaagggcgactagcagtctgggtcacagatttcaggctcttttcctatcattaatcccttgttagtccttccctgatatgctgccaggattgctaatgtagcaatccctttctgctgtgttttcaatttgttttctctttctgc

SEQ ID NO: 707 - DNA, 23 bp, Homo sapiens
tgatagaggcaagagtggagaca

SEQ ID NO: 708 - DNA, 23 bp, Homo sapiens
gaacctccacggtgatgaaatag

SEQ ID NO: 709 - DNA, 407 bp, Homo sapiens
cgacgtgatctgatagaggcaagagtggagacacagtggcaagggaaggtggggcaaggaggttccaggcagtgaggccagcaggcccagtgccccgtacagtgtggcctcctgggaggcaaattgcgtgcttggattctcttgcctccatcctttcctgtggctggtggagaaggattcgtaaggggaatggatctctttgtgggccacgtgccttcatttcccagcggttgctctagagttctgcctgcctcttcttcctatttcatcaccgtggaggttctctgcagcttactcagtggggcagcaagtagctcaggacaccaggcaacttttaagctctcataatgctgtgctggagttggagcagaagcttgtgctgtatgaagggccttggctggggtttc

SEQ ID NO: 710 - DNA, 23 bp, Homo sapiens
ctctgaggaagttttgtttccga

SEQ ID NO: 711 - DNA, 23 bp, Homo sapiens
ctccacggtgatgaaataggaag

SEQ ID NO: 712 - DNA, 338 bp, Homo sapiens
ctctgaggaagttttgtttccgacgtgatctgagagaggcaagagtggagacaaagtggaaagggaaggtggggcaaggaggttccaggcagtgaggccagcaggcccagtgccccgtacagtgtggcctcctgggaggcaaattgcgtgcttggattctcttgcctccatcctttcctgtggttggtggagaaggattcgtaaggggaatggatctctttgtgggccacgtgccttcatttcccagcggttgctctagagttctgcctgcctcttcttcctatttcatcaccgtggaggttctctgcagcttactcagtggggcagcaagtagctca

SEQ ID NO: 713 - DNA, 21 bp, Homo sapiens
gacccctggcttaactactgg

SEQ ID NO: 714 - DNA, 19 bp, Homo sapiens
ccaatgccgttacaccaag

SEQ ID NO: 715 - DNA, 533 bp, Homo sapiens
  misc_feature 482: n = A,T,C or G
gatctcttatcctggaagggcattgccgctaacggaattggcagctagcagtcttaccatggaatcttaatgcaggacatgcatcggtatgaactgttacctcagatgtctagcatcatacagccaaacaagtttagccaggccctgggacgtgtggctcagacccctggcttaactactggtttatactactttaccacatcacatcattaacttaagcatcacgccctaaaactacttggtaaaaaagcctctggctataaaaatggatttatgtgtctcttctccatcaaattggggaaaaccagttacgtgatagttagcaaacacgttgttgaaagatggtcttaaatggaaaggttgtccttttgggggcaggtagatggacttcaggattttgtatagtaggtgggcttggtgtaacggcattgggcaagaagagcaagtttaataagtgggcaattaaaagttatataagtggncaagtgtggtggctcacgcctgtaatcccagcactttgggaaggctgaggg

SEQ ID NO: 716 - DNA, 18 bp, Homo sapiens
tgtggaatggaaactgcc

SEQ ID NO: 717 - DNA, 19 bp, Homo sapiens
gcatgaaaccctgttctcc

SEQ ID NO: 718 - DNA, 354 bp, Homo sapiens
attggttactacaaaatgtttggcatggcaagtgcagtggtgaatagggctagacagaatctctgcccttgtgggtctcataatctggcctggacaataggcattgaacaagtaattaagtaattataatcttgatgcctcttgtggaatggaaactgccatggaagtgtttgataggggcctgacctcatttggtcttggtgatggagaagttccactatgaaactgatatttaagacctgaggtatgagtatgaatcagccaggtaaagacaaaagaaaaaagaagatggagaacagggtttcatgcaagaaacaaaacacactttgctcatatagcacttagcaccacatt

SEQ ID NO: 719 - DNA, 23 bp, Homo sapiens
aaaacatgaatgttcctccctcc

SEQ ID NO: 720 - DNA, 23 bp, Homo sapiens
tgctatgttctgggagttgttca

SEQ ID NO: 721 - DNA, 492 bp, Homo sapiens
cttcagatactcagttgaggacataagaaaacagatacaaatttgttaagtaatcacacatcttttcatatgtgtaaaagctgctagaaaaacatgaatgttcctccctccatgaccaggaagactcttaacatgtatttctccaagagagtttctaatctttctttataacataggcatatttttctcattcatatagatgacatcaggcacaagttagtaatcagtctggattcattctggggctcagaaactctcaagctattttgagcaagaaagagatttagcacaggaaattctgtgcttgcagaattgttggaagggctgagagaagaggctctcagctggacctatgtgaacaactcccagaacatagcagaactggcccaccaggtcagctgctacttctctaattgggaacatacagaatcaggagctgccattgaagctgttggcttcaaaaacaccctgttgtgtctgcagcccagagat

SEQ ID NO: 722 - DNA, 20 bp, Homo sapiens
ccagtcatacagatacaggg

SEQ ID NO: 723 - DNA, 20 bp, Homo sapiens
aaggaccccatgtgaacagg

SEQ ID NO: 724 - DNA, 359 bp, Homo sapiens
  misc_feature 25, 30, 31, 210: n = A,T,C or G
ggattacaggtgtgagcctggaccnggccnncaaggtgacttttgagtaaaaacacctgatagaatttaggaaaccagtcatacagatacaggggaagagcattcaggcaaactgcatggtagtgcaaaggccctaagacaggaaaatgcctgtgtattcatgaaaagatagcaaactcaagggtagtaagagctataagaggtagggtngcctgttcacatggggtccttcaggtcaaaggaggactttggttttactttaaatgagacaggctattgaagaggtttgtttttgtttttgtttttgtttttttctgagacaaggtctcactctgttgcccaggctggagtgcaatggc

SEQ ID NO: 725 - DNA, 19 bp, Homo sapiens
agagcccagagctaggtgc

SEQ ID NO: 726 - DNA, 19 bp, Homo sapiens
tggcgacagagcaagaccc

SEQ ID NO: 727 - DNA, 248 bp, Homo sapiens
  misc_feature 118: n = A,T,C or G
gccattgcactccagcctgggcaatagagtgagactccatctcaaaaaaaaaaagaaaaagaaaagaaatatcaattaaatgcccatcatgtacagagcccagagctaggtgctagangatctaagtgcaaaggtaaaaagatataatctacgccctcaataaatgtaaaggcaaatagaagagatacaatttttttttttttttttgagacagggtcttgctctgtcgccaggctggagtgcaatgg

SEQ ID NO: 728 - DNA, 19 bp, Homo sapiens
ctggcgacagagcaagacc

SEQ ID NO: 729 - DNA, 20 bp, Homo sapiens
ggtgctagagatctaagtgc

SEQ ID NO: 730 - DNA, 250 bp, Homo sapiens
  misc_feature 114: n = A,T,C or G
gccattgcactccagcctggcgacagagcaagaccctgtctcaaaaaaaaaaaaaaaaaattgtatctcttctatttgcctttacatttattgagggcgtagattatatctttntacctttgcacttagatctctagcacctagctctgggctctgtacatgatgggcatttaattgatatttcttttctttttctttttttttttttgagatggagtctcactctattgcccaggctggagtgcagtgg

SEQ ID NO: 731 - DNA, 22 bp, Homo sapiens
attacccatcatgagctgtgtg

SEQ ID NO: 732 - DNA, 20 bp, Homo sapiens
agccagttggtcaaaagtgc

SEQ ID NO: 733 - DNA, 572 bp, Homo sapiens
  misc_feature 547, 561: n = A,T,C or G
gaattagacaaatatgctttgaaacatggtattacccatcatgagctgtgtgtctctgagcatagtactttagcacttcaagcattattttccttatctgttaaacggggataagaatcactacctctggtgcaattctgatgctagctacccagagtgaggacaaatttcacaggttgaaggcacagtcctctataatactcccctcacttcagacacccaccacaagctctgggacccccaggccacctgcacttttgaccaactggctacaaatttaggggttcttactactacctcagctttgataattcactagaaaagctcacagaactcaggaaagcactatattaatgattgcagctttattataaaggacacaaatcaggaccagctaaatgaagagatacgtagtgtgaggtctaggaggaggggtctcaaatgcaggagctctcatgtcctctggacacataccctttccagcatgtcagtgtgtgtcttagtcagttctgggctgctattaaaaaataccatagactgagtggcnttaaacaacagaanttatttctcac

SEQ ID NO: 734 - DNA, 20 bp, Homo sapiens
agctctgctagcatccgaag

SEQ ID NO: 735 - DNA, 18 bp, Homo sapiens
ccctagtgtgtggtgggc

SEQ ID NO: 736 - DNA, 376 bp, Homo sapiens
  misc_feature 348, 363: n = A,T,C or G
gatcaggggcttgagcatctgtgaattttggtattcacagggggtcctggaaccaatcccccatgactactgagggatgactgtactaaccactcctccaagtagcatggagcagctacttgggagcagtgagcagagaagcctgtaggaagtgtgtgtgaagtgtgagctctgctagcatccgaagaaagagaggaagcgaaacgactgacttcccggccctgcctcccctgccatgtcagatagaagcttggagactgacccttgaaagctccgactaaggaccaaaagagagtcaggtgtggagagcttagtgggccctaacatgcccaccacacactaggggcngtgcccggccagttntgctgggcccccg

SEQ ID NO: 737 - DNA, 24 bp, Homo sapiens
ccattaacactgaaagtacaggag

SEQ ID NO: 738 - DNA, 24 bp, Homo sapiens
atatcaggcttctaccattgggtc

SEQ ID NO: 739 - DNA, 393 bp, Homo sapiens
  misc_feature 234, 285, 297, 393: n = A,T,C or G
acaaacaaacaaacaaaaaaccaaaaagatgagccggtgagcgtaagcaaagcccattaacactgaaagtacaggagaagcatacccactccacattaataatgccaaagtcttgtcttaaactgttaaagtctagtagtgtgtatattacaagataggagtgacactgctccatcctctggacccaatggtagaagcctgatattgtgatttatccaaatcacaccagttatngcaatggatagaggaatgatctgggaatttagagtcctgtccaccaactgnatccacaactgngtaagtcattttatttggtgacttcagtttcgtcattgggagaaacaagattgtccagaagatttttatcaaacttaacttgttttctgccaaacn

SEQ ID NO: 740 - DNA, 20 bp, Homo sapiens
caagataggagtgacactgc

SEQ ID NO: 741 - DNA, 21 bp, Homo sapiens
gatcattcctctatccattgc

SEQ ID NO: 742 - DNA, 373 bp, Homo sapiens
  misc_feature 16: n = A,T,C or G
actccagcctgggtgncacagctagactctctctaaacaaacaaacaaacaaacaaaaaaccaaaaagatgagccggtgagcgtacgaagcccattaacactgaaagtacaggagaagcatacccactccacattaataatgccaaagtcttgtcttaaactgttaaagtctagtagtgtgtatattacaagataggagtgacactgctccatcctctggacccaatggtagaagcctgatattgtgatttatccaaatcacaccagttatagcaatggatagaggaatgatctgggaatttagagtcctgtccaccaactgcatccacaactgcgtaagtcgtttttattttgtttggaacttccagtttcg

SEQ ID NO: 743 - DNA, 20 bp, Homo sapiens
atggtgcgttatttccaagc

SEQ ID NO: 744 - DNA, 21 bp, Homo sapiens
tgctcattttttttccattgc

SEQ ID NO: 745 - DNA, 428 bp, Homo sapiens
gaggaaagaaaaaatatttgaaaacctgccatggtgcgttatttccaagcgtctgttgatggaggtgtgagccaagaagccctttttattggaggaaagaaggagagagtaaaaatggaagcaagggagatatgaaaaaatgatggaaaagggcatggagaaaccatctcagagagtggaataaagttatgcaatggaaaaaaaatgagcaaaaaccattgcctatacaatgcaactgaaatgtgctcaattccaggttttagctcacctctggctaaaggtaagtgagcttaccctggctcactttgggtaagccagggaagccagtcttatctcaaccatttaatttggggcaatttttaccatgtaactaacccataagagacatcaggatatattaacatgatgctgtggccaggctcgtcggc

SEQ ID NO: 746 - DNA, 19 bp, Homo sapiens
tcacttgagcccaggaagg

SEQ ID NO: 747 - DNA, 20 bp, Homo sapiens
agagatacccaacactgagg

SEQ ID NO: 748 - DNA, 305 bp, Homo sapiens
  misc_feature 131: n = A,T,C or G
gccactgcactccagcctgggtgacagagcaagactccatctcaaaaaaaaaaaaaaaaaacataatcctagagccaggtgccatggtgcacgctgatattccagctacttgggaggttgagacggcatgntcacttgagcccaggaaggtgagaccagccgaggcaacataatgagacaatatctccaaaaacaaagaaccaaacatataatctaagttatggtgctttatacatagggtactgaaaaactccctcagtgttgggtatctctgaaataaagaattagtataaacatctattgtt

SEQ ID NO: 749 - DNA, 21 bp, Homo sapiens
gattttgacttggggtcattc

SEQ ID NO: 750 - DNA, 22 bp, Homo sapiens
caggacacaaagtaaaacctcc

SEQ ID NO: 751 - DNA, 421 bp, Homo sapiens
gatccgcccgtcttggcctcccaaagtgctgggattacaggcgtgagccaccgcacctggctgggattctgtgtttaatagaagattttgacttggggtcattcatggactatatacacattgagaaacacttgtcataggacctaaaaatataatgagtttacagagaaggaaatgttgagagaaacggagcaagaaaactggaggaacagggaggttttactttgtgtcctgatctttactgatttgagagattttatactgatatgtatcaccctcctatgatgtatatacaaaacatattatttgtacataattagaaaatacttatgtatattaacagccactgaatcctggtgacagttaggtagggcaaacaaacaaacccagctaaaatcaaaaccccaaccggaacaaaaaa

SEQ ID NO: 752 - DNA, 21 bp, Homo sapiens
gatactgaaggcctggaagag

SEQ ID NO: 753 - DNA, 21 bp, Homo sapiens
acctgtccactccatacttcc

SEQ ID NO: 754 - DNA, 410 bp, Homo sapiens
aactgaagctaacacctgagatactgaaggcctggaagagttaggtacggctgatgacactgttgaaaagtcataaacgcacccaagttgagcaagaactgtgttggcccgtgtgtgagaaaaaatagccacgtccagactgggagaatttactacttccaaagacaagttaatagaagcggcacaggacatggaagtatggagtggacaggttaccatttgtacgcggtgattgtgtttttaaatgtgctgtaactagcagccatttttattaatgggccaatctaaacagggttgaaaaagattaaccgtgacgccaccccaaattacaatagggtcttgtagatctctttttatagctgtaaaaacggaatcattcttggctctgtgtaatgtttataaggcgtgtc

SEQ ID NO: 755 - DNA, 20 bp, Homo sapiens
gaattcggtgcgatcagctt

SEQ ID NO: 756 - DNA, 20 bp, Homo sapiens
ctaacgccccaccctaacct

SEQ ID NO: 757 - DNA, 20 bp, Homo sapiens
cctaccaaattgccctcagg

SEQ ID NO: 758 - DNA, 22 bp, Homo sapiens
agtgtatacgggatctctctgc

SEQ ID NO: 759 - DNA, 307 bp, Homo sapiens
gccactgcactccagcctgggtgacacagagtgagactgtctcaaaaaaaaaaaaaaagaaaaagaaaaaacagaaaaaaacctaccaaattgccctcaggatattttaaaagaaacctggttttagaatgcatagagaagtctcaaagatagtgcagagagatcccgtatacactgcatccggtttctcctcttgttaacatcttagattactgtggtgcatttgtcacaaccagtgagccaatactgatacatcattattaacttaaagttcatactttattcagatttctttagttttcactta

SEQ ID NO: 760 - DNA, 20 bp, Homo sapiens
ggtgagagaattagacccag

SEQ ID NO: 761 - DNA, 21 bp, Homo sapiens
catttgtcacaaccagtgagc

SEQ ID NO: 762 - DNA, 275 bp, Homo sapiens
  misc_feature 4, 5, 7: n = A,T,C or G
cccnncnccattgcactccagcctgggtgagagaattagacccagtgtcaaaaataaaataaaataaaggaataaactagttatataaggtgactagttcaaaattaataaactaaaatcaaaagttttggatggaacctaacagaaaaaggacattaagtgaaaactaaagaaatctgaataaagtatgaactttaagttaataatgatgtatcagtattggctcactggttgtgacaaatgcaccacagtaatctaagatgtttaacaagagg

SEQ ID NO: 763 - DNA, 22 bp, Homo sapiens
tccaacagaatggatttcaatg

SEQ ID NO: 764 - DNA, 21 bp, Homo sapiens
gtcttgtgccttagtttcccc

SEQ ID NO: 765 - DNA, 440 bp, Homo sapiens
  misc_feature 239: n = A,T,C or G
gatctggaatacattgtagccaaagactgcttccttaatatacttgtagctgttctccaacagaatggatttcaatgcatcttttccagtctatgttacaaagtgattatcaattaaatctaacacttaatgtcaactaacttctaatacttagtgattatgatgtgcaaggtatatttttaagcactttaagtatactaactcatttagccctcacaatcacctcatggctgtctcangctctcattttcaagatggggaaactaaggcacaagactagacattggagagcagtttggctgcacagtcgggatcagcaaacttttttcttaggggccaaaacaacatatacgtcagtgtgtagatgatctgttggaactactcaactctgctgtggtggcagagaagaagccatagatgtgtgagacgaatgaacgtgc

SEQ ID NO: 766 - DNA, 20 bp, Homo sapiens
ttgtcatgcaacttatctgc

SEQ ID NO: 767 - DNA, 20 bp, Homo sapiens
aaacacaaagtaggtggtgg

SEQ ID NO: 768 - DNA, 697 bp, Homo sapiens
gatcgccaaacccttacctgtaattgtgattcacattgtcatgcaacttatctgcagaactttttcgttttacaaaactgaaaccctctatctattaaacaacaacttcctttcccctatgccctggcaaccaccacctactttgtgtttctataaatctgactactttaatgttttattttttcaagtccaaagtgagcaagaagatctgggaaagtttggaacttcctagagacttgtgtaatttcaatgtgaatatttcaacactgacactactgaagagtatacttaaaaatggttaaaatgtctgtacccagtggttatgactgtaatcccagctactcacaggaggctgaggggggaggatcaattgagcccaggagttcaagtccagcctaggcaacatagtgagaccctgtctctgaaacaaaaattttttaaatggttaaaataaataaattttatattaagtgtttttaccacaatttttttttaagctagatggataagtatttcactttgtttcctctccagtaaggggaaaaaaaccaaatgttgaaaaacaagctgggaaaccgagccttttacccccagagtttaagtctccttaaaggccggacggcttaccgtgaacccgaaaagttgccccattgcgcccggggatttttagggttcagcctattccaaaaggccaatt

SEQ ID NO: 769 - DNA, 22 bp, Homo sapiens
acctaaataaactctctccccc

SEQ ID NO: 770 - DNA, 22 bp, Homo sapiens
tttccagtatgtaatggtcacc

SEQ ID NO: 771 - DNA, 563 bp, Homo sapiens
  misc_feature 222, 456, 461, 465, 489, 533, 554: n = A,T,C or G
gatctcgcctctacaaaaagagtcaaagatcatgaatgcttaaaacacacctaaataaactctctccccctactattatattgctaagagcagtggccaactgggtgccaaaaacacactgaaatgtgcaagatgtacatattaagtgtaaaacttccttttaaaagtagggacagtgtctcgctatgttgcccaggctgttctcaaactcttggcctcaantgattctcccacctcaacctcgcaaatttggcggattacaggcatgagacactgtgcccagctcaaaatttcttttttaaaagcactgaacagagaaaaaactttgaacaaaataaaaatttaggtgaccattacatactggaaaccagtacctgatgaacgatccttgtattttctattcaaattacaaaagttacacatttattttccactatctgatctaaattgcctaanccccncccntgataaaacctgaaggttccgggntaacaaaggacagctgtgctgtaacagtttaacttttcccaaanggggttaaaattcctaaaacnccccgggtc

SEQ ID NO: 772 - DNA, 20 bp, Homo sapiens
cttatcttaggccatgctgg

SEQ ID NO: 773 - DNA, 19 bp, Homo sapiens
ctggtacctggagttcacg

SEQ ID NO: 774 - DNA, 356 bp, Homo sapiens
ccactgcactccagcctggctgacagggcaagaccctgtctcttaaaaaaacaaaacaaaacaaaaacacaaaaaaagcaagaatgtgggctttagggtttcacagacctggtttttgagccttatcttaggccatgctggttatgagtacgtgtgttcaagtgtgtgggaaataaagaaagaacagatatgataacttatttgcagaatgctgaggaggtattatttctgtcctcccctcccacgtgaactccaggtaccagtgactcagtttatgtttcattcctcctctgagacgttaggcaagtttttttttgccttttgggttttcagttttttcaacagttaggagggag

SEQ ID NO: 775 - DNA, 20 bp, Homo sapiens
tgtttgctctggttccttgg

SEQ ID NO: 776 - DNA, 19 bp, Homo sapiens
ctgggaagccaaacactgc

SEQ ID NO: 777 - DNA, 330 bp, Homo sapiens
  misc_feature 31, 205, 211, 213, 215, 216: n = A,T,C or G
ggattacaggtgtgagccaacatgcctaccnatagctaataattttgttactgtttgctctggttccttggcttgtcaaaaagtaggccagtcctttaaaatgttttcacagatggaaattattttaattcagaattgatgcttagaaattgggcagtgtttggcttcccagaaaatgacactttaaaacatttatttatttacntatttngngnnatttccaacaagaatgagcttgaaaagcatttgtgttttcattggaacaaaatctttggtatgttgatggtagcatcgttcttggctgacaaagaaactaagaaagggaaaaac

SEQ ID NO: 778 - DNA, 19 bp, Homo sapiens
gcctctgtgtcccaaaagt

SEQ ID NO: 779 - DNA, 24 bp, Homo sapiens
aggggtttatctgttccaacctac

SEQ ID NO: 780 - DNA, 456 bp, Homo sapiens
  misc_feature 391, 443: n = A,T,C or G
tgctggccaggctggtcttgaactcctgacctcaggtggtctgcctgccttggcctcgcaaagtgctggaattgggggcatgagccactgcgttctgccccaaaaatggatatacatactttacatatgcctgcttaagcagtgcatatattatacaaaatactttcattagcctctgtgtcccaaaagtaccattttacaaattattttctagctacattttaatttcaaattcaaaaggaagaacatttgatgaaataactgctgttaagtgcatggtaggttggaacagataaaccccttctcttgttaaaaccttgttctcaaaacaagcaaaatccttgtttctttaaaatattttatttcatactcccctgaggtttaaggactngcctgttttcccaggttttacagtcaggaccttgtctttaacggggcacccnggggtttctcggg

SEQ ID NO: 781 - DNA, 25 bp, Homo sapiens
atgaaacagtagatgattgtcctcc

SEQ ID NO: 782 - DNA, 22 bp, Homo sapiens
agtcgtctccaatcagaagagg

SEQ ID NO: 783 - DNA, 423 bp, Homo sapiens
gatcaagcatataaaatgaaacagtagatgattgtcctccataagaattcttagtttgctcaaaaaatttgttaagcaagctttaatgataaagtctcattctaaatccacatgccaattattgaaaatacttacatatgaactgcctttccagttctgaagattgaaaaaacctcttctgattggagacgactttagcatctgttggtggatattcaggatattctcttgtaatttggattttatctttctgttaactgcaccttaaactaggtctcgctctatcgtattgaatggtggccaaattgatactagtaataattatgcacaatacaatcaatggagtggtatacctggtccaatggcctaataaagttggcaaaaagattcgaaatggaactggaacctgacttaaggaattgg

SEQ ID NO: 784 - DNA, 21 bp, Homo sapiens
tcttgatgtactcaacttcgc

SEQ ID NO: 785 - DNA, 21 bp, Homo sapiens
gatactcacttaacaccaagg

SEQ ID NO: 786 - DNA, 347 bp, Homo sapiens
  misc_feature 2, 3, 6, 7, 21, 31, 42, 45, 46, 48, 60, 62, 143, 144, 155,191, 345: n = A,T,C or G
annatnncactccagcctggntgacagagtnagtctctctcnaanncncaaaaagggggncnggggaatgcaattggcccctcttaggtgagtactgttcttaaaattcttgatgtactcaacttcgccttgtatggtgaggnnttttactgatngggtaagttagagaatcccattcatttcccatgtcntttatcagtgtcttgtgaatgtttatcagaatttgcctgctgcaccattcatggctctaggcaaatgctttcaagtatccttggtgttaagtgagtatccagttttactcatcttcctgttgctcatcacttattcattgacctatagttggtnac

SEQ ID NO: 787 - DNA, 20 bp, Homo sapiens
cacctcagcctcctaagcac

SEQ ID NO: 788 - DNA, 21 bp, Homo sapiens
gaaaactctaggcccagatgg

SEQ ID NO: 789 - DNA, 421 bp, Homo sapiens
atgatacattttcataatatggcacaaggtaaggctacaagttctttatttttgtttttgaaatggggtcttgctatgttgcccaggctggcctcaaacaatcgtctcacctcagcctcctaagcacacacctctgcgtccatctctatttttttgcatatggaaatccaattgttccaccaccatttgttgaaaaggctatcctttctccatttcattcatctgaatattattttgatgccatctgggcctagagttttctttgtgggaaagtttctaaactacaatttccacttatttaatagatgtaagacaattaaggtcatgtagttctttcagaatgaaatttcataatttatctttcaagaaatttgtccatttgtccaatgttgaacttatttgcatatagctgctcatatca

SEQ ID NO: 790 - DNA, 22 bp, Homo sapiens
cgtaacatgaaacatcctctgc

SEQ ID NO: 791 - DNA, 22 bp, Homo sapiens
tggtgaattgtaatgttgcttg

SEQ ID NO: 792 - DNA, 527 bp, Homo sapiens
  misc_feature 451, 458, 461, 466, 475, 477, 481, 482, 483, 491, 494, 497,512: n = A,T,C or G
gatctctttggtcatcaactgactcttagatttatgcttataagccagattcagaatatcctactatacgtaacatgaaacatcctctgccaacatggaaactaaagttagaaaaaagtcattctaatatcttgatatagttttgtatttctaaagtttctgaaaaaaatatgtgaacaggtcaagtgcactgaaagtaaatgtgtctaattcaacatctacataaattcagtcttttgcaaaggaaaatgacctaaaactgagaaaaagattttgttttattccataaatagacacaattttacagaattcatttttcaaataattactaaaagaatacaagcaacattacaattcaccaaattagaaaatttaaaaaattactgcgtttacttaagtacattgaatacaggttattgttctctccctcagccctaaaaatacccccccngttttcntangggcnggggggggnanaaannncccctaanaanctnttaattaacttaccngagacttattttttt

SEQ ID NO: 793 - DNA, 22 bp, Homo sapiens
cttttttttaacgtatgctttg

SEQ ID NO: 794 - DNA, 24 bp, Homo sapiens
aaatagggaaatacttctttacag

SEQ ID NO: 795 - DNA, 534 bp, Homo sapiens
  misc_feature 442, 508, 528: n = A,T,C or G
gatctttagataatcagagtttcttcttgggaatgacatatataagtatatatatatgtatatacttttttttaacgtatgctttgcttccaagtacttatttaaattctctaggatccagaatactccataaaaataagcctactaacgtcttgccttctctttgtttactggaattcattctattcattcattaataataatagctagacatttgtagcttgtgttttagcttgtgctaaggaatatgtacacacaaatacgcatacacacgtgtatcttacttaatactgtaaagaagtatttccctattttacaaataaacaacttaaggatcagaagttaacttgtccaagatcctctaacaagtagagtttggggcttaaaagccaggcttgtctgactcttgagcccttgcccttgaccactgctttgcactggntttattcaacaaactgaataaaagtattgcaaaattcaaagagggtccctaaggaccaacctcaanttctgacaatcaagctgggnaatttt

SEQ ID NO: 796 - DNA, 23 bp, Homo sapiens
tttagacaggttgatcccttcca

SEQ ID NO: 797 - DNA, 23 bp, Homo sapiens
gcaaacagtttttgtgatggtga

SEQ ID NO: 798 - DNA, 22 bp, Homo sapiens
aaagtttttagcgctcaaggaa

SEQ ID NO: 799 - DNA, 21 bp, Homo sapiens
tttcctatgcattgcctatgc

SEQ ID NO: 800 - DNA, 437 bp, Homo sapiens
  misc_feature 365, 404, 423: n = A,T,C or G
tgcaatttaaataatggtattttatttttatatataaataaatgttctgagaaatctcagactttagtgcattgctgtaaaaaattagtgcagttttttttattaaagtttttagcgctcaaggaataagataaatctatgtctgttcatagtctctttcactgtacattaaacttttatactgctataagtcaaaaggaacatttctacactggtctgttcttaaaaatcaaggtaaatgaatttcatgttctatgacaaaacatggcaattatttttggcaaagaaattagaaaaatatgagatcatagtttagaaatgaagagtttgttgatttaaagcataggcaatgcataggaaaaacntttttttaaggatggtatttttaacagaacttttatccntcatgccaaatggttttcncggcagctaaccta

SEQ ID NO: 801 - DNA, 22 bp, Homo sapiens
aaacatggcaattatttttggc

SEQ ID NO: 802 - DNA, 21 bp, Homo sapiens
tttcctatgcattgcctatgc

SEQ ID NO: 803 - DNA, 437 bp, Homo sapiens; identical to SEQ ID NO: 800
  misc_feature 365, 404, 423: n = A,T,C or G

SEQ ID NO: 804 - DNA, 24 bp, Homo sapiens
atgtcctgagaaatctcagacttt

SEQ ID NO: 805 - DNA, 25 bp, Homo sapiens
tgtacagtgaaagagactatggaca

SEQ ID NO: 806 - DNA, 217 bp, Homo sapiens
  misc_feature 30, 123, 192, 201: n = A,T,C or G
aaataatggtattttatttttatatataantaaatgtcctgagaaatctcagactttagtgcattgctgtaaaaaattagtgcagttttttttattaaagtttttagcgctcaaggaataagntaaatctatatctgtccatagtctctttcactgtacattaaacttttatactgctataagtcaaaaggnacatttctncactggtctgtcctta

SEQ ID NO: 807 - DNA, 22 bp, Homo sapiens
gatttatcttattccttgagcg

SEQ ID NO: 808 - DNA, 22 bp, Homo sapiens
ttaaagaaaatacccaatgtcc

SEQ ID NO: 809 - DNA, 492 bp, Homo sapiens
gatcagaggatctcatatttttctaatttctttgccaaaaataattgccatgttttgtcatagaacatgaaattcatttaccttgatttttaagaacagaccagtgtagaaatgttccttttgacttatagcagtataaaagtttaatgtacagtgaaagagactatgaacagacatagatttatcttattccttgagcgctaaaaactttaataaaaaaaactgcactaattttttacagcaatgcactaaagtctgagatttctcagaacatttatttatatataaaaataaaataccattatttaaattgcctttgggattagccccttccctttccttataaacacaggtagcaggaactgtgctgctcatttttctgttagtagtgtgtacttcatgccaggacattgggtattttctttaaagtgaatatagaatctcaagatatacgtagcttcatcatttgacaatttcccagagccaatagtc

SEQ ID NO: 810 - DNA, 20 bp, Homo sapiens
caacagggcttcttctcagg

SEQ ID NO: 811 - DNA, 20 bp, Homo sapiens
tgttgggttttgattttggg

SEQ ID NO: 812 - DNA, 380 bp, Homo sapiens
aacacaagtatgtttatttccatataataatttagatcaaattattcttaagaaatggatctttcttcaattatcaccaattccctgatgcaattactagaaaagtattatgatttttaaaagattgtcagttttagactcttaagaaaaacaacagggcttcttctcaggggtcctaatttataaattcactaaagaattatatatgttaacaaaattcaacttgttttgagaaaaatatatgtcaattgctacccaaaatcaaaacccaacatatatgttccatataaagtctagtcttgcatttgaaatctgacttttcagagtatgtgatgtgtttaaaatttttttggaggaggggctagaaattaaaaaattct

SEQ ID NO: 813 - DNA, 20 bp, Homo sapiens
tcttcagcttaaaaggccca

SEQ ID NO: 814 - DNA, 20 bp, Homo sapiens
cagcctcacatttttcagca

SEQ ID NO: 815 - DNA, 335 bp, Homo sapiens
  misc_feature 98, 187: n = A,T,C or G
gttaagtagctagtaaatataaattcaaagaattctgacaaaatcattattacctttttctcaagtcacatatttatttaggaggaaagatgcttganagctagctataagagaaggacaactttagacactgggtgaatcttcagcttaaaaggcccagtgctggatgaatgactcacaacagccnatccaccaaatgcagagctgcctaagcggaggcagaaggatgctgctcagaagcacagaggaatttatcaaggctataagctaaacttgctgaaaaatgtgaggctgatttttatattttggtatgtgatgggaaaaataaactaatt

SEQ ID NO: 816 - DNA, 25 bp, Homo sapiens
gacaactttagacactgggtgaatc

SEQ ID NO: 817 - DNA, 20 bp, Homo sapiens
ctgtgcttctgagcagcatc

SEQ ID NO: 818 - DNA, 335 bp, Homo sapiens; identical to SEQ ID NO: 815
  misc_feature 98, 187: n = A,T,C or G

SEQ ID NO: 819 - DNA, 22 bp, Homo sapiens
ctttggacagagacccagttaa

SEQ ID NO: 820 - DNA, 21 bp, Homo sapiens
cctccattagcaagttccatg

SEQ ID NO: 821 - DNA, 436 bp, Homo sapiens
ttttttaattaatttgtcatgaatatggacaaagccttttctggggtgtgtgtgtgtgtgtatgtttgttttttaagtcgtcattattcattcgtattctttttctgtgtaatgtaatcatataaagttactttggacagagacccagttaattttctcttttgataggatacatggtttagataaggtataaagtgtccctttttattctagaggcttttcctttaattcagagattagtggagataataacatcagtcaaggctaatgtggtacatggaacttgctaatggaggttggacattctgtttcagtcttacatggatattgtttcattggtgttgaggaagaaaaaaattagatactaccatgcattgggacagcataattctaatattacattgaatatggctttttaaaaataagtattaaaaag

SEQ ID NO: 822 - DNA, 20 bp, Homo sapiens
agagccagcaaaccaagtgt

SEQ ID NO: 823 - DNA, 22 bp, Homo sapiens
gtcatcagttaaggcaggaacc

SEQ ID NO: 824 - DNA, 400 bp, Homo sapiens
  misc_feature 11, 13, 20, 290: n = A,T,C or G
tttttcttctngncccgttngatccaggtgggttacccctgccatggtggtagcttctttccttgcctgcttgtctctgcacaagtgactaggtgacagcgtaaacagacccaggttcagctgctcaccatgcaaaagccagacagagggttggtgggaggaaaagcaggtttaaatggagagccagcaaaccaagtgtcaggcctctgagcctaagctaagccatcatatcccctgtgacccgcacgtacacatccagatggccggttcctgccttaactgatgacatnccaccacaaaagaagtgaaaatggcctgttcctgccttaactgatgacattgtcttgtgaaattccttctcctggctcatcctggctcaaaagctcccctactgagcacc

SEQ ID NO: 825 - DNA, 22 bp, Homo sapiens
tttcactagaaagcatcatctg

SEQ ID NO: 826 - DNA, 21 bp, Homo sapiens
tgtagttgctcactgcatatg

SEQ ID NO: 827 - DNA, 503 bp, Homo sapiens
  misc_feature 380: n = A,T,C or G
gatcctagttccttttattggagaacagtactagaaaccaagatctgggcactaggtatgctcaagtagataatatattatcccatcttatagagaagaaagctgcagccttgaataacttgcccaaagtcacgtggctattttacttctaactctgctcatttcactagaaagcatcatctgtctgcctctctcttcctatttattaatctcaaactaagcaaaatgtatccgggttgcaggaagagagaagacactgtgcccacacaattcctactgcttgtaaactataaagcattataaacatatgatatctatgtctatatatatgcatatacatatagccatgtagctttgtattattcttttacaaaagaaantgtgtgtgtgtgtgtgtgtgtgtgcgcgcgtgtgttcctagacacacatgccatatgcagtgagcaactacatcaatgggaattttgtccaagggctcccctttgcgttcaatcccccatgtt

SEQ ID NO: 828 - DNA, 21 bp, Homo sapiens
cagtagttgagagtatcctgg

SEQ ID NO: 829 - DNA, 20 bp, Homo sapiens
atgagggtaagaggataggg

SEQ ID NO: 830 - DNA, 353 bp, Homo sapiens
  misc_feature 19, 24, 28, 29, 38, 39, 45, 194: n = A,T,C or G
ggattacaggcatgagcgngtggnactnnctcccaggnntgtttnacccaatgggaaacagtagttgagagtatcctgggcaagtgtcagttttcctctctgaaagggatgaaggccccactgttttttaatagactttgttttttagagtagttttaggttcactgcaaaagtgagaggaaagtgcagagagntcccctatcctcttaccctcatccatacaagcctcccccattatccacatcccccaccagactggtacatatgttaaaattgatggacctacactggcacaccattatcacccaaagtctatgggttcacactggagttcactcctgggtgtacaccct

SEQ ID NO: 831 - DNA, 19 bp, Homo sapiens
gatgccaaatgtgtcctcc

SEQ ID NO: 832 - DNA, 19 bp, Homo sapiens
gaaactcaatgaggggagg

SEQ ID NO: 833 - DNA, 22 bp, Homo sapiens
cctattcaaatgctaattaatc

SEQ ID NO: 834 - DNA, 17 bp, Homo sapiens
caagatgacttttgcgg

SEQ ID NO: 835 - DNA, 20 bp, Homo sapiens
gattgttcatttccaatggg

SEQ ID NO: 836 - DNA, 20 bp, Homo sapiens
cgcatggaaagaaactggtg

SEQ ID NO: 837 - DNA, 23 bp, Homo sapiens
atgactgcatgccaacacactat

SEQ ID NO: 838 - DNA, 23 bp, Homo sapiens
gttcaggacacatttgaagagcc

SEQ ID NO: 839 - DNA, 711 bp, Homo sapiens
ggaattccaaggcaaatttgaagtgcctgcctgaaacatgactgcatgccaacacactatgtagtgctgtgaggaggttagaggtatgttgtcaagccagggaccaagaaatatagtggttaactagacaggtgagaaatcttcttgtgtatattagaggaaggacattcgggcagtcagcgttccaccttctaactgtagtgctgaagcgcatcccagtaaatggtggggtcatagtggttgcttttgtagacattatgagatgttgttcttcagtagtagggattaagttgcaatgattgctgagtcactgttgtctgaatgtgccggctcttcaaatgtgtcctgaacacaaagaatttgagaacccctgactcaggaagtagggcaggtaattatgcatagactcttctttcctggtggctgctgcccctcacctgaatctaaatgctcagcacttactccttgatggagcacctgttccatgggggccaggcctcagcaaacctacccccaaaaatccaaggaagctgagaggctgaagaaaaaggctgacatatccagttcctcagaaatatacacttaatagggacttacaaacagaagccatgtctgtgtctcaggcagcagtgaggcaagatggtggatcctgcaccatttattctcatgaccagggcttatataatactgggaaagggtatatgtgattca

SEQ ID NO: 840 - DNA, 21 bp, Homo sapiens
tatttcttggtccctggcttg

SEQ ID NO: 841 - DNA, 20 bp, Homo sapiens
atttgaagtgcctgcctgaa

SEQ ID NO: 842 - DNA, 22 bp, Homo sapiens
aaaaagaattatctgggagggg

SEQ ID NO: 843 - DNA, 22 bp, Homo sapiens
aaaagagattggttatggtggc

SEQ ID NO: 844 - DNA, 468 bp, Homo sapiens
gatctagagaagttccaaagaacaagggaacttcaagatcatatgtgatcatagcaacagatgagttttcttttttaatgtgaattctccaaactaaaaagaattatctgggagggggatacgtaatatgaacctacccaaatataagaggacaaaagacaatataggataaggtaagtctccctcctactctttgctcctagccaggcagttccccttcccagaaacagccaccataaccaatctcttttctacccttccagagttaattttttttaatatacaagcatatacaaatatccttttttaaaaaaccactagacccagatttactaatacataccttgtcaagttaaaaaatatattttactgggcaagcctgagggctcacacctgtaatcccagcactttgggaaggccaaaagccagtggatcgcttgagggccaagagtttgagatcagcctggg

SEQ ID NO: 845 - DNA, 20 bp, Homo sapiens
ccttacaagctccttcagcc

SEQ ID NO: 846 - DNA, 21 bp, Homo sapiens
cttaccccataaaggcagacc

SEQ ID NO: 847 - DNA, 440 bp, Homo sapiens
gatcacatgttgatacaattgtttatatttctctatatatactgtacctgtatataactgggctacacacctactatactaatatatacaaagaaaaaacactgtctttttcaaattctgttagaaaaataatttttatctgatgcagaatcaaggaaaaataaataaatgaatgttctgatattccttacaagctccttcagccatgcggcaatggttgttttggtggctggaatacaaggaaaaagggggccaaattttatggcaatttgttaaagttaatggaatgaagtcaggagttcactgaggtaagttttcggtcccttgaatgtcctctccttctccttgctcctctcctaggtagggtctgcctttatggggtaagggtgaattgtatgacatcatagtgtcatcagtggggacaggaaagacgaggtcct

SEQ ID NO: 848 - DNA, 18 bp, Homo sapiens
cacagcactgcatcccag

SEQ ID NO: 849 - DNA, 22 bp, Homo sapiens
gttgaagggcttagacacaagg

SEQ ID NO: 850 - DNA, 453 bp, Homo sapiens
gatcgtttgagcccaggaagttgaacgagctgtgatcacagcactgcatcccagctggggagataggaccctgtgaaagaaaaagcaagaaagcaagaaagcaagcaagaaagaaagaaagaaaggaaggaaggaaggaaggaagaaagaaaggaaagaaagaaaaagaaagaaaagaaagaaagaaggaaagaaagaaaggaaagaaagaaagaaggaaggaagggaaagatagaaagaaaggaaggaaggctctctttcctaaaaaagaaagaaaggaagagaaagaaagaaagagagaaagaaagaaaggctctctttcctcctttctgcaaccaagtttggttctaagggaggtcaaaaaccagaaccttgtgtctaagcccttcaacccatgtctgatccttccattcctgcagccagaatgggcaggtgtggggttccatttcatct

SEQ ID NO: 851 - DNA, 23 bp, Homo sapiens
gcatgtgcccctaccacttaata

SEQ ID NO: 852 - DNA, 23 bp, Homo sapiens
taattggcattccagatgctttt

SEQ ID NO: 853 - DNA, 19 bp, Homo sapiens
atcccaagcctgtttctgg

SEQ ID NO: 854 - DNA, 22 bp, Homo sapiens
tttttgagcctctctaggatgc

SEQ ID NO: 855 - DNA, 450 bp, Homo sapiens
  misc_feature 325: n = A,T,C or G
gatccggggactgagaagaaataggtccacacatcatctgtaccttgttataaatcccaagcctgtttctgggctgacactttgctggtgcattcaagttttgcaaactaatttctgttaactggtaatataatcaggaaatataatctgctatcagagtcatcctacaacacattactaatcagtgatttgtggattatttactcagttgccaatgtccttcttcaaaagtatgacaatcatttaaaattgacctttacacattttgagcttgaaaattaagcatcctagagaggctcaaaaactaacttataagttgagaacnccccatgatcaattagggcaaattaggtagtttttaataagccaatgtgttacttctctaatatatgttttcacttgtatcccaaaacctatgacaatctcaactcagcacaattttttctatgg

SEQ ID NO: 856 - DNA, 22 bp, Homo sapiens
gccttccttagtgtttgtgtcc

SEQ ID NO: 857 - DNA, 21 bp, Homo sapiens
gaaaaatttctctgccttggg

SEQ ID NO: 858 - DNA, 389 bp, Homo sapiens
  misc_feature 382, 384: n = A,T,C or G
ttctccgagagggggatttggcagggtcataggacaatagtggagagaaggtcagcagataaacaggtgaacaaaggtctctggttttcctaggcagaggaccctgcggccttccttagtgtttgtgtccctgggtacttgagattagggagtggtgatgactcttaacgagcatgctgccttcaagcatcgtttccatttaaccctgagttgacacagcacatgtttcagagagcacggggttgggggtaagattatagattaacagcatcccaaggcagagaaatttttcttagtacagaacaaaatggagtctcctatgtctacttctttctacacagacacagtaacaatctgatctctctttcttttccccacatcncnccctc

SEQ ID NO: 859 - DNA, 19 bp, Homo sapiens
tcctctgtctttcccccac

SEQ ID NO: 860 - DNA, 22 bp, Homo sapiens
tagagtctcaaatgcccagatg

SEQ ID NO: 861 - DNA, 691 bp, Homo sapiens
  misc_feature 606, 618, 629, 632, 641, 654, 666: n = A,T,C or G
tctgggctgtttaaaagtgtgtggcacctccctcctctgtctttcccccaccaccccttctcctccctctccctttcatcatgagtgtaagcttccagaggccctcgccaggagctgagcaaatgactgtgccatgctagtaccgcttgcagaaccatgagctaattaagccccttttctttataaattacccagtccttggatatttatagcaatgcaaaaataaactaacacagtgaaaaaggcatttcaaaggcagtaacgcatggtatattaagagaaatgagaggatgtgcttaaaaccttcacacagaaccattttaaaaatatcttccaatatattaaattattcatctgggcatttgagactctacataaatggaaccccatccagctttgctacatttcccaaaggttacatagcaagtaagagtgaactctccaggaccagtgtgggttaagagtttcaagtttcttaacctcaatttcttcatctggtaaaaatgggaatgacaataatacctatctcataggggtactatggtatggtatgagggaatgatagacacttaaaaccagcacaagttaaacccattccataaaccnccagcatattanccctttatttnccncacctaggncaatgtggcatcnggaggtggtaancccccaacacatggccccaatccgg

SEQ ID NO: 862 - DNA, 25 bp, Homo sapiens
tactgaggctgtgtaaggtttaacc

SEQ ID NO: 863 - DNA, 22 bp, Homo sapiens
aagggccagctactgttcatag

SEQ ID NO: 864 - DNA, 486 bp, Homo sapiens
  misc_feature 132, 133, 135, 278: n = A,T,C or G
ttatttttagtttaaaatcattttcaaatgtattatctcattaatacataccttcagtaccattgatttagacagaccaagttgatctactgaggctgtgtaaggtttaaccacattccaaacttgagtggnngnttctcgttactgtgaattttctcattggtttgtgtgaaaaatcttcctatgaacagtagctggcccttagttatggatagatattaaaagaaagactgtggccgggcgcagtggctcacgcctgtaatcccagcactttgggnggccaaggcaggcagatcacctgaggtcaggagttcgagaccggcctgaccaacatggagaaaccctgtctctattaagaattacaaaattagctgggcatggtggcgcatgcctgtaatcccagctactcaggaggctgaggcaggagaatcgcttgaatcccaggtggctagaggttgcagtaagccaagattgcaccactggact

SEQ ID NO: 865 - DNA, 21 bp, Homo sapiens
cctgcagaaaatggtagaagc

SEQ ID NO: 866 - DNA, 21 bp, Homo sapiens
atctggccagctttaagatcc

SEQ ID NO: 867 - DNA, 382 bp, Homo sapiens
  misc_feature 214, 216, 218, 219, 220, 221, 222, 223, 224, 226, 227, 228,230, 233, 235, 236, 237, 238, 242, 258, 268, 333: n = A,T,C or G
tgatagagagaatgagaggctaaagatatttcctgcagaaaatggtagaagcttaaatacacgattgcatgagtgacagtctgaaagtctctgaaagtggttgtcagccctggctgaacatcagaatcatctgtggagctttaggatcttaaagctggccagatttatttgtttttaaatcaaaaccctcccctaggcctaggcctacccaccnanannnnnnngnnncnaantnnnncggntggagaactttcctgnggttgttgantcctggtagtcatagtgtgtcatatgtattttttaccaccttacctatataaataggtttttagnttttgttgttgtttggtagagatagggtcttgctgtgttgcccaggcct

SEQ ID NO: 868 - DNA, 21 bp, Homo sapiens
gtatgcttattcaattcagta

SEQ ID NO: 869 - DNA, 20 bp, Homo sapiens
tggtgacatgactcttcgcc

SEQ ID NO: 870 - DNA, 287 bp, Homo sapiens
  misc_feature 63, 64, 65, 66, 67, 84, 85, 86, 87, 88, 89: n = A,T,C or G
agaaaaaagtatgcttattcaattcagtatttatattctagaataatgtgctcaaaatatttnnnnngatgtggattataggtnnnnnntatatatatatatagggtgtgtgtgtgtgtgcgcatagtgtgtgtgtgtgtgtgtgtgtgtgtgtgtgtgtgtgtagatttttctttcttttagagtatagaaattgttttagatatcccttaagtagagaaatagcacttaggaaggaagtatacacttagaaggcgaagagtcatgtcaccaacaggttgggagaa

SEQ ID NO: 871 - DNA, 21 bp, Homo sapiens
gagcccagaataagcttttgc

SEQ ID NO: 872 - DNA, 20 bp, Homo sapiens
cagcaccatttgttgaaagg

SEQ ID NO: 873 - DNA, 611 bp, Homo sapiens
  misc_feature 485, 487, 489, 515, 523, 530, 536, 567, 580, 582: n = A,T,C or G
aggaacaaagcaggaagactcatactttctgatttcaaaacttactacaacgctatggtaatcaaaacaatatggtactggcataaagacagactcagacaccaatggaatagaatacagagcccagaataagcttttgcatacatggtgaaatgatttttgacaagagcgccaagaccattcaatggggaaaggacagtcctttcaacaaatggtgctgggaaaactgcatatgcaaaagaatacagttaggtgaatactacttacaaaaattaactcaaatgaatgaaaaactttaaatgtaagacctaaaacttataaagctctcaccaggaaaacataaggtagatgctatacagcactggctttggcaatgttttcttagatatgacattaaaggcatatataaccaaaattaaaaaacagataaattggacttcatgaaaattttaaaattttgtgcattcaaaggccctttctacagncntnaaaaggggcccccccgattggggggnatattttnccaaccnatcccnatatctttccaaggggtttccatccccgccncttttaaaaatgngntcctccaccaaaaaaacaacctttttttt

SEQ ID NO: 874 - DNA, 23 bp, Homo sapiens
cagacaccggtagtgaaatggtt

SEQ ID NO: 875 - DNA, 23 bp, Homo sapiens
caggattcatccccattatgaaa

SEQ ID NO: 876 - DNA, 442 bp, Homo sapiens
tccttagcctcagacaccggtagtgaaatggttactgcaatgtcaagggagaaatgtcaaatactaagaataaggggtgactctggcagaagtaaaagctgatagcatatgtaaagccccataatacatctagtaaaaacaatgaattaggccaggttaaatagttgaatcaattcattttacttccacttcttattatataatatctctacctgataaaatatatgcacaccaaagtcgcagccttgttctacacttaatatcactggtttcataatggggatgaatcctgttactaaaagaacattcatttgttaataacaacatttttgttactctgatggaagcaagtctcaaaaaaggttttgacaaaaatgttacatacgaatatgacctaatgtataatcttcaccccaatcactgctcaaaaggttctaaaatt

SEQ ID NO: 877 - DNA, 22 bp, Homo sapiens
ttaaaatcctcctctgctgagg

SEQ ID NO: 878 - DNA, 19 bp, Homo sapiens
ggaagatgtggatggaccc

SEQ ID NO: 879 - DNA, 186 bp, Homo sapiens
gattgggttgatgacggttaggctggggaaagaggctgagtagtatccacagaatgggtcattccattcacttgattattaaaatcctcctctgctgaggtcaccttttggtgagcactcacatgggatacaaataacttcacagtttttgaccactcagaggggtccatccacatcttccccaca

SEQ ID NO: 880 - DNA, 20 bp, Homo sapiens
gcctggcacatagtaaggac

SEQ ID NO: 881 - DNA, 22 bp, Homo sapiens
gcaactgattataggagagtcc

SEQ ID NO: 882 - DNA, 207 bp, Homo sapiens
gatcttgggaaagtatatataaaatgcttaaaacaatgcctggcacatagtaaggacaaatgagtaaaaccataaaggggaaaagcagttagaggggtgtgtgtgtgtgtgtgtgtgtgtgtgtgtgtgtgtgtgtgtgtctgtctgtgtctgtctgtctgttacaggactctcctataatcagttgcagtttttaaaaaccccctg

SEQ ID NO: 883 - DNA, 22 bp, Homo sapiens
tgttctagttgatgtgagactt

SEQ ID NO: 884 - DNA, 20 bp, Homo sapiens
tatttgaggacctgctgtaa

SEQ ID NO: 885 - DNA, 280 bp, Homo sapiens
  misc_feature 220, 249: n = A,T,C or G
agctattagggtataagcaaatatttttccctcaaatgttctagttgatgtgagactttcctttggcatgtattaatgaaagcaaggacataacccacccctttcctatgtgcatgtacatatgtgcacatcacacacacacacacacacacacacacacacacacacacacacacacacattttgtggttactaaacagtctaggccaggataaaattnagggagttacagcaggtcctcaaataatnttgttttggtataacattgatgtctgtaaaa

SEQ ID NO: 886 - DNA, 20 bp, Homo sapiens
agatgtgtgcattgggtgaa

SEQ ID NO: 887 - DNA, 20 bp, Homo sapiens
aggacacactggcaacttga

SEQ ID NO: 888 - DNA, 249 bp, Homo sapiens
agatgtgtgcattgggtgaattagcgtggcccctgtttgagtgtttatgggtgtgtgtgtgttagtgtgctctgcgatgggatggcatcccctccgtggtcagttcctgccgtgtgctctgactaccaggataggctttgctttcagaaatctccagataattagcttcatatatttctgtgttcaggtgctttcagtttctgcagctcagcaagcgtccagctttggatcaagttgccagtgtgtcct

SEQ ID NO: 889 - DNA, 20 bp, Homo sapiens
caaagcaattgcctgtgaga

SEQ ID NO: 890 - DNA, 21 bp, Homo sapiens
ttccttcacagtacgcctgtt

SEQ ID NO: 891 - DNA, 154 bp, Homo sapiens
caaagcaattgcctgtgagagcagctggtggcagtctttaagatgcagatttcaaataggagagaaaggaagagataaagataaaaagagaggaaagaagtgggagggcaagagaagagaaaaggagaaagtaaacaggcgtactgtgaaggaa

SEQ ID NO: 892 - DNA, 21 bp, Homo sapiens
cagcaccatactctcctctgc

SEQ ID NO: 893 - DNA, 21 bp, Homo sapiens
ggatggtctttctggcatatc

SEQ ID NO: 894 - DNA, 278 bp, Homo sapiens
cagcaccatactctcctctgctatatagcacactatcatattgcctgtttacgaggcatttgtgtttctccacagtgatgaattcttttatggtagggtctgtttctaatttaatttatttatgtagtttcagtgtttagcaggtggtgagtgctcaataaattttggttaaatgaatgaataaatctgactaattatagtgtacttggtataagataaatttgtataggaatccttttggagagagttaatttttggatatgccagaaagaccatcc

SEQ ID NO: 895 - DNA, 20 bp, Homo sapiens
attggtaaacttgggcctga

SEQ ID NO: 896 - DNA, 23 bp, Homo sapiens
tctctcaaattagagcccagaca

SEQ ID NO: 897 - DNA, 137 bp, Homo sapiens
attggtaaacttgggcctgagaaaggaagagatctgttatgtaagaaaaatactgatcaaaagaacaatatttgttgttgttgttgaccagctctgactgtgaaacatttaaagtgtctgggctctaatttgagaga

SEQ ID NO: 898 - DNA, 20 bp, Homo sapiens
aggtgctgggttcattaggt

SEQ ID NO: 899 - DNA, 20 bp, Homo sapiens
ggcaacagagtgagattcca

SEQ ID NO: 900 - DNA, 203 bp, Homo sapiens
aggtgctgggttcattaggtatatattctgtaattatgcctcataacatacattatatatatataaaaaaataaaaagtatatatataaaactgtaacatttgatagatgcatatatatatatatatatatatatatatatatttttttttttttttttttttttttttttttttttttgagatggaatctcactctgttgcc

SEQ ID NO: 901 - DNA, 2001 bp, Homo sapiens
tcatttgacatttagcactctgctaggtaccgggaaattagagcaagtaagaaataatttcatatcttgaggtacttatattagggggaagacagacatacaggcagatatttttttctgatatattagataaaggctttactcttccccgcccctgcccccctccatgtggaaacacatacaaacaggagcaaaaaagggaataccaaattcattttaaatacatgtagatacccaatatgtaatatgtgtcatcttactctaggatgtgagctttaaaaaggtggaagccaaattgtgcatgcttttgtatagatccttgcataaactagatagtatatagaaaattgacagtagtaagtgaaatgcttgattccttttaagaaagaaaattccaagagttatgttaagaacttctttaaaaaaaggcaagagtgaaaaaaatgcacaattcagaatagtgatgatcattgcagggaggcaggtagatggctttcggtaggggcccatgtatagcttcactgggattgtgtttttagttagcttgggctgctgtagcaaattaccatagattaggtagctcaaataacaaacatttatttctcacagttctgaaggctggaagtctgagatcagggtggaagcatggttgggtgccctcttcctaattatgtcttcacatggctgttcccatcacagggactccagcttcaagacttaatcgaaccctaattacctccctaaaggccctaggtctaaataccattacattggggattagggttttaatacattaattttgggaggacacaaacatttagtccatagcagattggaaatattttaattcataaattaggtgctgggttcattaggtatatattctgtaattatgcctcataacatacattatatatatataaaaaaataaaaagtatatatataaaactgtaacatttgatagatgcatatatatatatatatatatatatatatatatatttttttttttttttttttttttttttttttttttgagatggaatctcactctgttgcccagcctggagtgcaatggcgtgatctcagctcactgcaacctctgcctcccaggttcaagctattctcgtgtctcagcctcccaagtagctgggatcacaggtgcctgccactgcacctggctaatttttgtatttttagtagagatggggtttcgccatgttggtcaggttggtcttgaactcctgacctcaggtgatccaccacctgccttggcctcccaaaagtgctgggattacaggcgtgagccaccgcacccagccttcccagtctgaatttcttaaaagcttttgcttaggttaagttgtgggagaaaaactgaactcacccagctagccaaactatctctctgttgtctttccactttatccatctattttttactttttttggaaacacaataacaatagtgtagaagtcttttcacattgcctgactctcctgtttgtgtcccataaggttccatgtactctgtccagaactcagcttattatgtcaaaggattctgtctggactggtcagtcagagatataagttctcattacctcagtgtgtgtgtttgtatctgtatttaatgatgtttgtgcttggcttaggctggggattttgaaatctttgcagagtttcccaatttgttgggcagttttagaaatgatagtatcagtaggaaaaaaaaaacacagaaaaatacaatttcttctttcatctatgtcccatattatacaaatgttcgctgaaagcaccaattttctgggaaaggttttgactcagacttttttcaccctttacctctactctccaattcatgtttccttcttacaacgtggtcatatgcttgcccaggcctggcttatgaaccgtgcagaatatttgtggggtttgttttttaagccctaaactgtgcacatgatgcagtatttaatttggaatgagctcttagtt

SEQ ID NO: 902 - DNA, 21 bp, Homo sapiens
cgataggcactatcacaggag

SEQ ID NO: 903 - DNA, 20 bp, Homo sapiens
atcaatatgccaccatgcaa

SEQ ID NO: 904 - DNA, 214 bp, Homo sapiens
cgataggcactatcacaggagctgtgggctggccatctatatccatccatctatctattattccacccatccctccatccatccatccatttatttaattaagttatttttaacggttggctctggagttgacattcatttattttaaaagaacagtgaatcatagctcttttcctcaagatgcttgcttttatttgcatggtggcatattgat

SEQ ID NO: 905 - DNA, 20 bp, Homo sapiens
cagtagatggcgctgtagga

SEQ ID NO: 906 - DNA, 20 bp, Homo sapiens
tgaaacaacaaagggccaaa

SEQ ID NO: 907 - DNA, 408 bp, Homo sapiens
cagtagatggcgctgtaggacttagtttttaaagaaaacagtacagccagggggagtgggggcatggagtgggaagaaaactaaagcacattttaatgggctcttttgtaccaccaagacaatttcatcttagagtacgtgcctctaagaagtaaagatttttttttttttttttttttgacagagctggagaataattttaggaaaactaaatctccctgttgctatgtttgtgccagctttgtcacttggaaagtattagttgttttaagccacaaatatataaggaagttattttctttcaaaacattgccttatttatgagggttttgtttgtttgttttagctgtctttgtctctgtattttaatatttttgctcctagcttttttggccctttgttgtttca

SEQ ID NO: 908 - DNA, 21 bp, Homo sapiens
tgggtatgtgattggtgagaa

SEQ ID NO: 909 - DNA, 20 bp, Homo sapiens
gaaacccaatcatggacctc

SEQ ID NO: 910 - DNA, 363 bp, Homo sapiens
tgggtatgtgattggtgagaaaacagaccaagagttgttttttgtttgtttgttttttgtgacgaagtgttgctttgtcgcccagactggagtgcagtggcgcaatctctcctcccgggttcaagcgattctcgtgcctcagcctcccgagtagctgggattacaggcacacgccaccacgcccagctaatttttgtatttttagtagagatggggtttcgtcatgttggccaggctggtttcgaactcctgacctcagttgatccacccgcctcagcctcccaaagtgctgggattacaggcatgagctaccatgcccagcccagaccaagagttttaaattgaggtccatgattgggtttc

SEQ ID NO: 911 - DNA, 21 bp, Homo sapiens
gctttgcatatgttctcctga

SEQ ID NO: 912 - DNA, 21 bp, Homo sapiens
cccattcctctttgtctttgg

SEQ ID NO: 913 - DNA, 429 bp, Homo sapiens
gctttgcatatgttctcctgaggaacaggatagttataacttaaacttgcatttatatatttctgattaagttgttaactatggttctagatagaagaataaagaagtaaaattagatttcttaatttgatatatttaagtcccttattttgatctaatatatttgataaaatagtaatcttttaatagtagccctgttatacataataataatacctatcagatagggttgtggtgaggattagaccatatagtaaatgtaacatgtctagtgctgtgccctgaacttaacacgtgcttattaaatattaactattgctattaccattatcatcatcattaataaacatctatattttatatccccatgacttaatgtacagtataaagcataaatagtaaaattacccaaagacaaagaggaatggg

SEQ ID NO: 914 - DNA, 2001 bp, Homo sapiens
agatatttaagaaacactttctactctcctactttagaggaaaactttacatagcccatttatcttcatgtcttcttgagtcagcaaaacatttacaactataggaaagaagatgtttttcagaaatgaatgctgatcaaaaagaagtatagctactgtggcaaaattaggtaaatagttctatttgttaaggaaaaaatctgtcttgtggagttgtatataaagtacgaaattgaatatatagttatatgttagtgttcctattgcatactagagtctggatatacataggctcagagtaatttgttatggtccacaggaatatatattttaagatggactctcctaagagtgagaggtgatcctacagccagtggcttgcttggttgtaggatcagatgtgattaagttcagagaggagacattttgaacttctctggttgtagaaatgctgcctccctatttcctacaaatatacagtgaactctggatgtcttctgggacagagtagaaatacttgcaacaggaattggggtctggagatatatgcaacccagcagcactgttataaatattttggttttggtagcaaatttgcttacagtatacagccataccttgtagatatggtgggttccgtgtcagaccatcacaataaagtaactattgcaataatgtgagtgatacattttttttggtttcccaattcatataaaagttatgtttatactacattgtagtctattaagtgtgcaataatattatgtcaaaaaagcaatatataggccgggcacggtggctcactcctgtaatcccagcactttgggaggctgaggcaggcagatcacaaggtcaggagatcgagaccatcctggctaacatggtgaaaccccgtttctactaaaaatacaaaaaaattagccgggcatggttgtgggcgcctgtagtcccatctacttgggaggctgaggcaggagaatggtgtgaacctgggaggcggagcttgcagtgagctgagatcacgccgctgcattccagcctgggtgacagagtgagactctgtctcaaaaaaaaaaaaaaaaaaaaaaaaaaagcaatgtacataccttaatttaaaagtttttattgctaaaaatgctagtgatcatctgagccttcagtgagtcataagctttttgctggtggagggtcccctctcaatgttgatagctgctgactgatcagggtcgtggttgctaaaagttggggtggctgtatcagtttattaaaataagacagcaataaagttcattgaatgatgcttgaatcaattgactcttcctttcatgaaagatttctctgtagcatatcatgctacttgatagcattttactcacagtagaacttcttttaatattgggatcagtcctctgaaaccctgccactgctttatcaactaaatttatgaaatattctaaatcctttgttgtcatttcaacaatgttattagcatcatcacccggaatagtttccctctcaagaaaataatttctttgctcataccttatccctcatctgttcaagtttggtcatgagattgtaacaattcagtcacatctttaggctccacttctaatttgagttctcttgctatttgtatcacatctacagttatttcctccactgaagtcttaaaaccttcaaagtagtccatgagggttggaatcttcttcgctcctgtcaatgttggtattttgacctcctaccattaatcagaaatactcttaatggcatctagaatggtaaattctttccagaagaatttcaattttctttatccagatccatcagaagaatcacaatctatggcagaaatagcattacgaaatgtatgtcttaaatagtgaaacttgaaagttgaaattattccttgatccatgggctgcagaatggatggctgtgttaagaggcatgaaaacaacattaatctccttgtacatctccagcagagctcttgggtgg

SEQ ID NO: 915 - DNA, 2001 bp, Homo sapiens
ctttgaagttttgaaaccaggcactgacttctgctctccagctatgaaagtctgaggtggcattttccccccacctagtgtgaggctgttttatctgtatggaaaatctgtcgttcaggatagccaccttcatcagtgatcttagggagatcttctggataacttgctgcagcatctacatccacacttggtgctttgcttgcacctttatggaatggcttctttccttatacctcatgaagcaacctttgctagcttccaacttttcttttatagctttctttcctctctcagccttcacagaattgaagagagttagggccttgctctggattaggctttggccttaaggtaatgttgtggctggtttggtcttctatccagacatttggtcttcttatcagcaataagactgttttgctttgttagcatttgtgtgttcactggggtagcagcacatttaatttccttcaagaatttttttgtttgtattcacagcttggctatttggtgcaagaggcctagtttttgccctgattcagcttttgatacgtcttcctcattaatcttaattatttctagcttttgatttaaagtgagagatgtgtgactgttcctctttcttgaacatttaggggccattttatggttatttcattttttttccatttttttgtctaacgtgattcagagaaatgtagagttattaaatggactaattttcatatttttatgtctcagggaatagggagcccaaaggcaggcagcaagacaggagaatggctgtcctggtggaacagtcagaacacatagacttatctattaggtttgacatcgtacaggagtgtggttggtggtaccttaatagtaatatcaaagattgctgatcacagatcatcataacaggtatgacaataatgaaaaagtttgaaatattgtgagaataagcaaaatgtgacacggacatgaaatgagcacatgctattggaaaaatggcagtcatagacttgctcagtgcatggttgccacaaaccctgaatgtgtaaaagaccacaatatatgtgaagtacaggtgaggtatgcctgtacgtagttggtgcctgtagttttgtatccattgaaatatactgtcactcattgggtctgcaattgggtgtaataataatatcattttattgttaatgggctttgagtcttcctctttcttctgtgatagtttgccattgtcaagttaaatttttatgagctttttcagagcagaaattaaacattaaatggtttattaaccaaaataaggcaactgcctttagactttaatgtagtacccattttttcctacagcttatcgtcttcccagtttaaaaggcttaagcagaagagtaacagtatagttaaaagtttttaagttacaaagttggaacttgcctttttttgattatatgatcccaagagtcacaagagagtaggcagaaagattactgctttatcaataggtgaaagttcaggtttatctgaatttagaatattaaattgtactttaaccataccacatgtttttataacatataaatcataactgacttcatactattctgttattttatgaggtgatctgatgtggctgcaaagttgttaaagttaaccttgaagaaacctcctatggcttagtgtttatttgcaaaatcaatcacattttttcttctgccttattagactgatgaaatcattttctagcatatggaaacattcctggacctcctgttattttgcgtaaataaccccatgtgactcacaaatgttgaaaaagcagtagatatttccaaatgctattagaaccatcaaactaatacaaaaaattcttcggtgggacaaatgaagaccagaatgaagtctaagtcactgtttccagtgaagattagtcactttttccactctaattccagaatttctttaatttttcttgcttatgttagcaacagtattgtcacaaaagattcaaca

SEQ ID NO: 916 - DNA, 21 bp, Homo sapiens
ctgtacgtagttggtgcctgt

SEQ ID NO: 917 - DNA, 23 bp, Homo sapiens
caatggcaaactatcacagaaga

SEQ ID NO: 918 - DNA, 121 bp, Homo sapiens
  misc_feature 61: n = A,T,C or G
agttttgtatccattgaaatatactgtcactcattgggtctgcaattgggtgtaataatantcattttattgttaatgggctttgagtcttcctctttcttctgtgatagtttgccattgt

SEQ ID NO: 919 - DNA, 21 bp, Homo sapiens
attggcagagtgcaacttcag

SEQ ID NO: 920 - DNA, 22 bp, Homo sapiens
gcattcagtttaagatgccaaa

SEQ ID NO: 921 - DNA, 152 bp, Homo sapiens
attggcagagtgcaacttcagaactcttagaggattctaaaagcaaaggaaaaaagttttttagtttagtttagtttagtttttttgttttttttttaataaatgcttactacttctgaatcagacattctttggcatcttaaactgaatgc

SEQ ID NO: 922 - DNA, 20 bp, Homo sapiens
tctggtctgtgttgggaatg

SEQ ID NO: 923 - DNA, 20 bp, Homo sapiens
agccaggctaagcactcaaa

SEQ ID NO: 924 - DNA, 274 bp, Homo sapiens
tctggtctgtgttgggaatgtctgtttatatgtctgtgtcacatcatctgctctagcatggaggcttcatggaagacaggaaccatgtctgtttattttgtgtgatagtaacatggagctctatatatgaagctttatttttatttgatgatgatgatggtgatgattttctgtatgaatttctttcctggcttcagattgattgaatcttctgatcactattaatccagtggaactcagaagtggagtttacttttgagtgcttagcctggct

SEQ ID NO: 925 - DNA, 23 bp, Homo sapiens
ttcctgccaataataagacattc

SEQ ID NO: 926 - DNA, 26 bp, Homo sapiens
catagaacgttatgtttgcatatttc

SEQ ID NO: 927 - DNA, 419 bp, Homo sapiens
ttcctgccaataataagacattctttgtaaaagcactttaaaacttcatagaaatatgaccgggtgcagtggctcatccctgtaaccctagcactttgggaggccaagacaggtggatcacttgcggtcaggagtttgaaactagcctggccaacatggtgaaaccctgtctctactaaaaatacaaaaaaattagctggccatggtggtggtgggtgcctgtaatctcagctgcttgggaggctgaggcaggagaattgcttgaacctgggaggcggaggttgcaatgagctgagatcgcgccactgcgctacagcctgggcaacagagcaagactccatctcaaaaaaaaaaaagaagtgtgtgtgtatgtttgtgtgtgtgtgtataatagaaatatgcaaacataacgttctatg

SEQ ID NO: 928 - DNA, 24 bp, Homo sapiens
gtgcctggctacagaatttcctaa

SEQ ID NO: 929 - DNA, 21 bp, Homo sapiens
aacaacagaatgaggccctgt

SEQ ID NO: 930 - DNA, 90 bp, Homo sapiens
gtgcctggctacagaatttcctaagttattatttgttcgtttgttcattcattcattcatttattcaagacagggcctcattctgttgtt

SEQ ID NO: 931 - DNA, 24 bp, Homo sapiens
gtgcctggctacagaatttcctaa

SEQ ID NO: 932 - DNA, 21 bp, Homo sapiens
aacaacagaatgaggccctgt

SEQ ID NO: 933 - DNA, 90 bp, Homo sapiens; identical to SEQ ID NO: 930

SEQ ID NO: 934 - DNA, 21 bp, Homo sapiens
gatgtttagtccttggctgga

SEQ ID NO: 935 - DNA, 20 bp, Homo sapiens
aagcaaggaaacggtaggac

SEQ ID NO: 936 - DNA, 122 bp, Homo sapiens
gatgtttagtccttggctggatatttcagttctctgaaaatgtgtagctatcctgtgagaagcaaacatcttggaaacagtatagtatagttgaaggaaacggtcctaccgtttccttgctt

SEQ ID NO: 937 - DNA, 20 bp, Homo sapiens
tggcttaggcatttcccata

SEQ ID NO: 938 - DNA, 20 bp, Homo sapiens
tgtcatcttgtttgcccatc

SEQ ID NO: 939 - DNA, 397 bp, Homo sapiens
tggcttaggcatttcccatagaatgtagtttcaaagctgtacagattagataatttctgaggcttatttcattttaccaccaaaaattagggtttttcttttttttaggatttttttgagtgactttttcatgtgtttaaaaaaaatcggtaacagacataatcttatgaatcagaattttaaagtgaaagggactttgaaaaccatctagtatatttgcctaacttttatacatagggaaaccaaatttaagtttttaaactaacgtcatacagccaactgaaatgaatgagacttgagtgcacatctcctgactttctatgctgttcttttccctacagtacacataaatatatatacatatatatttatacaatgatgggcaaacaagatgaca

SEQ ID NO: 940 - DNA, 2001 bp, Homo sapiens
tgattcttttaaaaaattagttcttactatataagtattgtattaacatagtatcttcaaaacatgtggaatgtttgtaaaggcttctctgacattctctcaccaccatcatccccaatcccagctgcctacccaccaatgccagaaaatgacaactattttcagtttggttttctgttgcttcagacctttctctatgcattgacttagagatacatgttgtggatagacaaataggcttatgaaatatagtattgctgtgtgtgtttgtatgtgtacgtgtgtgcttgctttcctcacagaatcagtatcatacttactctgcctctcagtttgcaaacttgcttttttgactctgcccgtagatcttggatatctttcctattagtatgtagagataatttatcacagttttttcaacttcttacatacagtattatatttaggtctagcttaaccctttcctcttctcatagcaatctgatatggacaattagaagagaaaaaaattttagtaactgtgttagtttgttttcatgcagctgataaagacatacccgagactgggaagaaaaagaggtttaattggacttacagttccacttggctggggaggcctcagaatcatggtgggaggcgaaaggcacttcttccatggcgccagcaagaggaaaaatgaggaggttgcaaaagtggaaacccctgataaaaccatcagatcttgtgagacttattcactaccacgaaaacagtgtggggaatactgcccccatgattcaaactatcttccaccaggtccctcccacaacacaggggaattatgggagtacagttcaagatgagatttgggtggggacagagagccaaacctcattcagcctctggccccctcaaatctcatgtcctcacatttcaaaaccaatcatgccttccttatagtcccacaaagtcttaactcatttcagcattaactcaaaagtccacagtccaaagtgtcatccgagacaaggcaagtccctttcgtctgtgagactgcaaaatcaaaagcaagctagttgtttcctagacacaataagggtacaggcattgggtaaatacagccatttcagatgggagaaattggctaaaacaaaggggctacagggcccatgcaagtacaaaatccagtggggcaaattctaaagctccaaaaagatctcctttgactcagtgtctcacatccaagtcatgctgatgtaagaggtaggttcccacagtcttgggcagctctgcacctgtggctttgcagggtatagctcccctcctggctgctttcacaggctggtgttgagtgtctgtggcttttcaaggtggaaggtgcaagctgtcggtggatctaccattctagggtctggaggatggtggccctcttctcatagctccactaggcagtgtcccagaagggactctgtgtgggggctccaaacccatatttcccttccacactgccctagcagagattctccgtgagggccctgctcctgcagcaaacttttgcctgggcatccaggtgtttccatacttcttctgaaatctaggtggaggttcccaaacctcaattcttgacttctgtgcacctgcaggctcaacaccacatcgaagctaccaaggtttggagcttgtactctctgaaactatgcgctgagctgtaccttgaccccttttagcaatggctggagtggctgggatgcagggcaccaagtccctaggctgcacttagcatggggccctgggcccagcccatgaaaccattttttcctcctaggcttctgggtctgtgatgagaggggctgccatgaagacctatgacatgctctggagagattttccccattgtcttggggattagcattcagctccttcttgtgcaaatttctgcagccagcttgaacttctcctcaaaaaatgggtttttcttttctactgcatcatcaggctgcaagttttctaagttttatgctc

SEQ ID NO: 941 - DNA, 22 bp, Homo sapiens
tgaataggaccctcaaaggaaa

SEQ ID NO: 942 - DNA, 23 bp, Homo sapiens
catcaaatgggaagtacaaagga

SEQ ID NO: 943 - DNA, 173 bp, Homo sapiens
tgaataggaccctcaaaggaaacttaaacaatgttgaagtgatgtttgctgccatcagacagcacacacacacaaaaaactatgtctaaactgttaaagtggattttatgtaaattgttcatgataaacatttgcattatatattcctattcctttgtacttcccatttgatg

SEQ ID NO: 944 - DNA, 20 bp, Homo sapiens
tggctttcctgtggctaaac

SEQ ID NO: 945 - DNA, 21 bp, Homo sapiens
cagaggctggagggattaact

SEQ ID NO: 946 - DNA, 257 bp, Homo sapiens
tggctttcctgtggctaaactactggtgtttatataaaaaagatttttttttatttatttatgcatgtaggggtttcagccaagattcctgtctttagtactggaatatttgaattagagaaattaagaaagtgaaaaaggctaaagttcttgattcttaccttttatccttatagttaatgacttataaatatatttctttgggaaaataaagaatatcaattgactgtcacctcagttaatccctccagcctctg

SEQ ID NO: 947 - DNA, 19 bp, Homo sapiens
gggtttcagccaagattcc

SEQ ID NO: 948 - DNA, 20 bp, Homo sapiens
tttcatgtctgcctctgcac

SEQ ID NO: 949 - DNA, 395 bp, Homo sapiens
gggtttcagccaagattcctgtctttagtactggaatatttgaattagagaaattaagaaagtgaaaaaggctaaagttcttgattcttaccttttatccttatagttaatgacttataaatatatttctttgggaaaataaagaatatcaattgactgtcacctcagttaatccctccagcctctgcgttttttcctctaggtgacctgtaagggcctgctcaataaagccagtgtgatgatgttagctttgttgcatcttttagttttcttctttactcatcccacacttcccatacatatcccgcttcccttccctggtgtgtttaaaggtaaaagaagtaaagaagtgggagaagagacagtgtgaaggaggtgcagaggcagacatgaaa

SEQ ID NO: 950 - DNA, 21 bp, Homo sapiens
tgggtttgcataagtgtttcc

SEQ ID NO: 951 - DNA, 20 bp, Homo sapiens
gtgcacccaaatgcacatac

SEQ ID NO: 952 - DNA, 93 bp, Homo sapiens
tgggtttgcataagtgtttccactgtaccttgatttgtgtgtgtgtgtgtgtgtgtagtttaattctgtgtgtgtatgtgcatttgggtgcac

SEQ ID NO: 953 - DNA, 20 bp, Homo sapiens
cgtacgtgctatggtgctgt

SEQ ID NO: 954 - DNA, 20 bp, Homo sapiens
gcaaagggtttccacagaga

SEQ ID NO: 955 - DNA, 423 bp, Homo sapiens
cgtacgtgctatggtgctgtgtgcgcaagttgagtcctcttttccaaaatagattgtaaattccttatagacagagatgatttatcttggtaatttttattccccacacttctatgcacgtatgatacttagcctatgattcaaattaaaaatattcataagtcaaaagttcttacatatcccatgggttaaggagatgatttaaaacatacagggaagaacatatcagattaattaactctcagtgattaaggatgccagagaataccatggtaacaatagaagcattatgttttattttattgaatcttgaaggaaattggatactccaaagtataatataatatggaacatgcactgtgaatactgtactagttgacatgtgtaatttcttttcatcatttctctgtggaaaccctttgc

SEQ ID NO: 956 - DNA, 20 bp, Homo sapiens
aaggatgccagagaatacca

SEQ ID NO: 957 - DNA, 20 bp, Homo sapiens
attgcaaagggtttccacag

SEQ ID NO: 958 - DNA, 176 bp, Homo sapiens
aaggatgccagagaataccatggtaacaatagaagcattatgttttattttattgaatcttgaaggaaattggatactccaaagtataatataatatggaacatgcactgtgaatactgtactagttgacatgtgtaatttcttttcatcatttctctgtggaaaccctttgcaat

SEQ ID NO: 959 - DNA, 20 bp, Homo sapiens
gtaacggctgacattcacca

SEQ ID NO: 960 - DNA, 21 bp, Homo sapiens
caggaagagttcttgggttca

SEQ ID NO: 961 - DNA, 340 bp, Homo sapiens
gtaacggctgacattcaccatattgtggtttgtctgtgtgtatgttcctgtggataacttggcaatcgcttcctcagcgaaataacagccagtgtggttcagccaaagtttagaggaataaagtaactgaagtgggaggtttttctgtaatgccgagtgattttattcttggttctttctttttgaattgctcaggtagtgtttgccgtggtaggtattaaaaccaaaccaagcaaacaaacaaacagtaaaaacccaataacaaccaacaaacaggaaataccaggtaattcagattatctagttatgtgccatagtatgaacccaagaactcttcctg

SEQ ID NO: 962 - DNA, 21 bp, Homo sapiens
aagggatcttcaggatttgga

SEQ ID NO: 963 - DNA, 22 bp, Homo sapiens
tttggacatgtggagtagatga

SEQ ID NO: 964 - DNA, 403 bp, Homo sapiens
aagggatcttcaggatttggagtataagacacactcggccgggcatggttgctcacacctgtaatcccagcactttgggaggctgaggtgggcagatcataaggtcaagagatcgagaccatcttggccaacatggtgaagccccatctctattaaaaatataaaaattagctgggcgtggttggcacgcacctgtagtcccagctactcgggaggctgagacaggagaattgcttgaacctgggaggcagaggttgcagtgagccgagatcacgccactactccagtctggcaacagagcgagactccatctcaaaaacaacaacaacaacaacaacaacaacaacaaaaagaacacactcacaataggatataactaagtcatctactccacatgtccaaa

SEQ ID NO: 965 - DNA, 20 bp, Homo sapiens
tttggaagatagagccagca

SEQ ID NO: 966 - DNA, 20 bp, Homo sapiens
tgttctacccacagccttcc

SEQ ID NO: 967 - DNA, 152 bp, Homo sapiens
tttggaagatagagccagcatgagtttctaatagattagatgtaggatataagagaaagagttaagataaatctacgtttgtttgtttgttttttcctgtgtaagtgcattttacatcaacttagatgggaaggaaggctgtgggtagaaca

SEQ ID NO: 968 - DNA, 2001 bp, Homo sapiens
gatgcattattgccttagtttaggtcttagtcacagtcacgtcctaaattatgacagtttactttggtctttcggcctctagctgcctccaaccccttctctatacctcatctttttcctattgtctgtgatcaaaatgttctttaaaatgaacacagatggttttctttctatttatgctgtttgtcatttgttgagatgcttttacctgttttttgatattttgtcaaatatggtaaatttttggccattaatttttcacgtactgtcctgccctctcagcctacccatggtactgtatttacatgtaagttcaaccagttaatactgttccacagatcagcgaatctttgctaattttatttgtcttttttctttctgtgcctcagtgtggatattattgtgtgcttcaagttcattatctttctcgtgccaaatctgctattaatcccattattaatagtaatatggaaattgtgaatgtgatgctgatgaatgcagaactctattgtctttctgtaaagaatgttgagctttcttctaggaagtagtttgagtgaattgtggatcagtacaacccttttgacacttgttagagtttgtccagagttgtttttactctagggcagtggctctcaaagtgtggtacctggaccaacagtatcaatgtcaccttggagtgatgcttagcaatctgtgttttaatacatctctaagttattgtgatgtactcttaacttttaaccttttacccctttagaaaatataagtgcagcttactgccagtgcttttttaacgttacataaacatgggtctttgaggctgaagcaaatctgactgattttcaatgtggaaataaaatataaaaactgttcttagagttatttttaaactgaactaacatcagaatcacctgaatcatcagaatcgtctatttcggaaaaattagattcagccaataactgtttgagaactgtgttaacatcatgtgtaggaatgctatgttttctaggatttgacatttttggtgattgagaattactacattttgtaaatggatatatcactaccaaaaacagaatggtacaaatagaatgatgtattttgtttccaaagttgatatactagagcaatgtgaaagtaataattaaaatgagatattacatggcaaagttatctcagggtaaacgctgcagccgcaagtgccactggtgagtattctctgggcagatgggaaaaggatcaagaaccactactctggagctagttcagccttactactaggatgtaacccttctggagtctctgtgcagtgctctagatattcaatgaggtctctctcctttaccttgtcaaaatgtctcacagtcttatatgagtactgggaattatttagattaacattcatggtactttgtttgttcttatggaatttactctatgtatgtgcagcttaattttcagtcatagtctcaaggggaaccctgtgtagatttcctgagctcttctctgcatagctcttcctctttagcactctgccctgaagagtccatctctttcctcctctttaaactctgaactctgtcaccctaacttagtaagacctctgtactctgcttggggttatcattccttgtggtgcattccagaaagtgcttccagacagacatcagggcgaccttgttcattttccttttctcagggatcacagtcttaacactaacttttgtctgaggtgtgacagtaacttttttgtatatttttccagttttttcagtgtttacagtaggacagatctggtactagttattctgttatagctggaagtccaggtacttattttttatggtcatgaggctacatagaagctcattatatgaggaaaataaatgctgtactaatttcttcacatgatttcaggcagcactagagtgctatatgatacatattaggcactgtgctagcataggaggattaaaacccaaatgggatagtgcctt

SEQ ID NO: 969 - DNA, 20 bp, Homo sapiens
attgtgccttgaaggtggag

SEQ ID NO: 970 - DNA, 20 bp, Homo sapiens
aaagatcagcccacaggaat

SEQ ID NO: 971 - DNA, 361 bp, Homo sapiens
attgtgccttgaaggtggagtagggttttgatatgtgttagatgggttccaaggacattctacttttaaggaactaaatgagcaagggctcaaaggtgtaaaacgtggggaaggctgtaaatacacttatgaatgtcagcatagtccagaaccttaggaaaagcaatttaggtcttaaaaacaaacaaacaaacaaaaagacaacaaaaaactagtagtaggaatgtaaaaatgaagaaaaaaagaacaaacagaaagtctaaccccatagtaaaagtatacttccttaggccattcctatttattgccatgactaataaatttgggaatgcctgtggaaaattcctgtgggctgatcttt

SEQ ID NO: 972 - DNA, 2001 bp, Homo sapiens
tgtaaatacacttatgaatgtcagcatagtccagaaccttaggaaaagcaatttaggtcttaaaaacaaacaaacaaacaaaaagacaacaaaaaactagtagtaggaatgtaaaaatgaagaaaaaaagaacaaacagaaagtctaaccccatagtaaaagtatacttccttaggccattcctatttattgccatgactaataaatttgggaatgcctgtggaaaattcctgtgggctgatcttttcttaaccactattcaagactgctttacgttgatagtctaagccgatcatttcattaatattaaactccagagctcattcccgagtttccaagaatttgctgaattgcttttctctgttatctgcttctttgggtaacttccatatttttctttcttgccctgtaaaaattgatttcctaggttttccaagtgattgataatgtgacagtactataaagacttttcttagactctggtatgttcgcatttagtacaaatactgtcaagggttttataaagtgtataactaatatactttctacatatcttttactagggaattctaaacttaagtattttatttcattgaggttaaaatatgtcctgttaagattttttttctcttttaaattattagtgttttgcattgttaaaaatcagctggcttcttggattgagtttacttcacttttccagtgggtaacttttatctgacctttaggtctgtaattgtttggtttgttttctgaagctatggaatgttttggaaaaaataagcctcatggagaagggctattatccctgaaaatgatgagaccggaaatgagaaaagcaaaaatcagatatcacccttgaccatgtggatttcagtttttaaaaagtctttatcctctgtctctgagaaccattatttggaagtctgtttctctgcctctctgtgataagttctcaccaaagatcctcttgtgtttttattagaattacatcgaattcataaattggggagaatttatgtatttataatattgaatcttttcatttatgaaaatggtttatttctctatttaggtattctataatattatagacttttgtcctcaaagatcttacaaatcataatttggttagatttattcatgggtttttaatagtttttaaaaaatgggatctgtttttattatgtaatccaatcagttcttggatcagaaaattgatttttatatttaaagtccagcaaaactgctttgcatgcttattaaaatggcttgcaaactatcgtatattttctatggaatcatatatgcagtagcagtttttcttctattccaaacctcatacttctttattcttgaatagaagtgtcatagtgggattttttcttattcctgatttccggagactccaatatatcatttttcattttagaaagtttatttttcttgctatattggtggaagcttttttcttaagtgatgaatcaatgtaaaattttatacttttttattttggaaatttctagtttattagggtcctcttttaatggacaaggcagtagagactcaaaaaggtaatggagtttatttatttatttatttatttgattttcaacttttaagctcaggggtgcatgtgcaggatgtgcaggtttgttgcataggcaaatgtatgccatggtggtttgctgcatagatcatctcattacctaggtattaagcccagcatctgttagctattcttcctgatgctctccctcttcccatcccccaccatccaaggccccactatgtattgttcccctccatgtgtccctgtgttctcatcatccagctcctacttacaagcgagaacatgtggcgtttggttttctgttcctacattagtttgccgaggataatggcctccagttccatccgtgtccctgcaaaggacatggtctcaatttttttatggctgcatagtattccatggtgtatacgtaccacattttcttaatc

SEQ ID NO: 973 - DNA, 20 bp, Homo sapiens
tgatttccggagactccaat

SEQ ID NO: 974 - DNA, 20 bp, Homo sapiens
gatgggaagagggagagcat

SEQ ID NO: 975 - DNA, 375 bp, Homo sapiens
tgatttccggagactccaatatatcatttttcattttagaaagtttatttttcttgctatattggtggaagcttttttcttaagtgatgaatcaatgtaaaattttatacttttttattttggaaatttctagtttattagggtcctcttttaatggacaaggcagtagagactcaaaaaggtaatggagtttatttatttatttatttatttgattttcaacttttaagctcaggggtgcatgtgcaggatgtgcaggtttgttgcataggcaaatgtatgccatggtggtttgctgcatagatcatctcattacctaggtattaagcccagcatctgttagctattcttcctgatgctctccctcttcccatc

SEQ ID NO: 976 - DNA, 23 bp, Homo sapiens
tttaatggacaaggcagtagaga

SEQ ID NO: 977 - DNA, 20 bp, Homo sapiens
agggagagcatcaggaagaa

SEQ ID NO: 978 - DNA, 217 bp, Homo sapiens
tttaatggacaaggcagtagagactcaaaaaggtaatggagtttatttatttatttatttatttgattttcaacttttaagctcaggggtgcatgtgcaggatgtgcaggtttgttgcataggcaaatgtatgccatggtggtttgctgcatagatcatctcattacctaggtattaagcccagcatctgttagctattcttcctgatgctctccct

SEQ ID NO: 979 - DNA, 20 bp, Homo sapiens
cattcacccacacaaaaacc

SEQ ID NO: 980 - DNA, 20 bp, Homo sapiens
gggaaaaggtctcactgcac

SEQ ID NO: 981 - DNA, 255 bp, Homo sapiens
cattcacccacacaaaaacctccaccaccacacacacacagaaataagagtgaaaataaacattccatcatattgacagtgattaccttcgggcggtgtaattaaggttgatatttattttctcctttatgtagttctgaatttcccagatttttaagattaaatatgtattgctctctaactagggaaagaagtaaaataattataaataagatagattaaatggattattatggtgcagtgagaccttttccc

SEQ ID NO: 982 - DNA, 22 bp, Homo sapiens
aggaagcagtgttgaaatgaaa

SEQ ID NO: 983 - DNA, 21 bp, Homo sapiens
gccacaatcctgaaactaggg

SEQ ID NO: 984 - DNA, 379 bp, Homo sapiens
aggaagcagtgttgaaatgaaatactttaaatcctgaagatttatgaggaagaaaatacttgggcaaatagtgtcaatgagtcctgatacgtattgctaacttgtcactagttcactttacatctgtgtagtgataactttgttttttcctccctcattgattatagtctctcatcccaccatttgccaaggccgtgtaaatagtttgctgtcgtagagatacgcagcaggcccatttgagtagttctctttcactctgatctccttagaaacctatcacttttacctttaaatgatacatttttaaaaaactattgttgttgttgaatgggatttccctaaataagaagagccatctccctagtttcaggattgtggc

SEQ ID NO: 985 - DNA, 22 bp, Homo sapiens
ggctccttcaacctattcattt

SEQ ID NO: 986 - DNA, 20 bp, Homo sapiens
ggattatgggaagccattga

SEQ ID NO: 987 - DNA, 217 bp, Homo sapiens
ggctccttcaacctattcatttgtttctatgcttatttccacttcttttttcactacactaattcagttaactgccacctgttttgtgaacaattgagtagtttctcaattttgttttgttttcctccagttcctcaacctgcacaaaacatctagcttactgctcttcaaatatgctattatcatttcattctttttcaatggcttcccataatcc

SEQ ID NO: 988 - DNA, 24 bp, Homo sapiens
aacatttctctaccatggtctgtc

SEQ ID NO: 989 - DNA, 20 bp, Homo sapiens
ttcatcctgctttgttgctg

SEQ ID NO: 990 - DNA, 297 bp, Homo sapiens
aacatttctctaccatggtctgtcaggcaaactgtggctcacgactggtgcacagcgtgttattgtagcactcacaagttaagaatgggtttatagttttaagtgattgtaacaaacataaaacaaagaattttatatatatatatctagagagagcgagagaggagagagagccctcaaagtctaaaatatttattatctggccctttaagataaagtttgccaaaccctggtctatattagtagtaatagtttactaccagcattcaaaacgtgccagcaacaaagcaggatgaa

SEQ ID NO: 991 - DNA, 23 bp, Homo sapiens
tcatggagaaatttgtatggtca

SEQ ID NO: 992 - DNA, 23 bp, Homo sapiens
tgctcctaaattacgtattccaa

SEQ ID NO: 993 - DNA, 185 bp, Homo sapiens
tcatggagaaatttgtatggtcaaaacttgccaaatttgagactcacttatttgtttaaatttaaggatcagtaaaaataaataaataaataaataaataaatgtaggaatctaagatagagacctgtactattctgaatgtgaatgaactgattacattgattggaatacgtaatttaggagca

SEQ ID NO: 994 - DNA, 23 bp, Homo sapiens
tcatggagaaatttgtatggtca

SEQ ID NO: 995 - DNA, 23 bp, Homo sapiens
tgctcctaaattacgtattccaa

SEQ ID NO: 996 - DNA, 185 bp, Homo sapiens; identical to SEQ ID NO: 993

SEQ ID NO: 997 - DNA, 23 bp, Homo sapiens
tcatggagaaatttgtatggtca

SEQ ID NO: 998 - DNA, 23 bp, Homo sapiens
tgctcctaaattacgtattccaa

SEQ ID NO: 999 - DNA, 185 bp, Homo sapiens; identical to SEQ ID NO: 993

SEQ ID NO: 1000 - DNA, 20 bp, Homo sapiens
gcagatcacgaggtcaagag

SEQ ID NO: 1001 - DNA, 20 bp, Homo sapiens
gtgggacacacagacccaga

SEQ ID NO: 1002 - DNA, 373 bp, Homo sapiens
gcagatcacgaggtcaagagattgagaccatcctggccaacttggtgaaaccccatctctactaaaaatataaaaattagctgagtgtggtggcacgcacctgtagtcccagctactcgggacgctgaggcaggagaatgacttgaacccgggaggcggagattgcagtgagctgagatcgtgtcactgtactccagcctagtgacagagcaagactccgtctcgaataaataaataaataaataaataaataaattttaactgcagaattacctatttaaaaagctgcttagtagttaagtagctgattgtccctttaaaacaattgatagttatattgttctaaaattgagtctgggtctgtgtgtcccac

SEQ ID NO: 1003 - DNA, 21 bp, Homo sapiens
cctccctttctagtggctcct

SEQ ID NO: 1004 - DNA, 20 bp, Homo sapiens
aagccaggctgatgtgagag

SEQ ID NO: 1005 - DNA, 158 bp, Homo sapiens
cctccctttctagtggctcctaaccttattaagagtctcttgtcttaagaaattgttctactacttcagtatttagcactctctctctctcttcaccatcacagctattctccactttttatctcctatttattttggctctcacatcagcctggctt

SEQ ID NO: 1006 - DNA, 21 bp, Homo sapiens
tcagcacttctgccaactctt

SEQ ID NO: 1007 - DNA, 20 bp, Homo sapiens
gcagctcagtgagtttcgtt

SEQ ID NO: 1008 - DNA, 849 bp, Homo sapiens
  misc_feature 498: n = A,T,C or G
atcatggtgctcatgacattttacagttccttatctccccccaagattccagaaggcaggagccatgtctttttcattctctaccacaatgcctggcctatagtagacacccattaaaattttgttaaatgttgttaaataattaaagcaagagaaaaatcatcctatataacatgttagggtttagaactacatatggtattcctgtatttaactttgaatatttctttaaacataagtaaatgtggaaaataataatgctgcttttcagcacatgctcttatttttctatcttcacacattccctaattttaaaatctctttatgtttgtttttattccagactacaaacatcaaatcttttttttttctatttggatgcttttaagtataaagtgtcacttaatatcagcacttctgccaactcttattcatttttccagctgtatttggacaacatttacatagataattttgtgaaattttcaactagaagtntgagataaatcatgcagttttcaattcagtgtatcctgaaagataacgaaactcactgagctgcctggttttccaacaagctacatagaaagcatgaggagggcagaaggctatggcttccactgttttgaccacttcacagcccttcccgcagactgcttggagatggctcaagtggaacctgttgataaattaatgatcctctttttcccagtcaccattgagccaaagtaggctatggggctgaatcatcccagacagggatgaatgaatgttctgaaaagctgaaacataaactgtcagttaagatgcattttcttcaagtttatttgtgacagatgatggaaggta

SEQ ID NO: 1009 - DNA, 20 bp, Homo sapiens
gattggcaggatgttcgttt

SEQ ID NO: 1010 - DNA, 22 bp, Homo sapiens
tgagaatcaaccttatggagca

SEQ ID NO: 1011 - DNA, 121 bp, Homo sapiens
  misc_feature 61: n = A,T,C or G
cataaactgataaaaggaaaattaattcctatctttataaagtgaagaattgttttttttnaacaaattaacatatcctgagttacattcttgagtgagatatgagaatttaaacatataa

SEQ ID NO: 1012 - DNA, 21 bp, Homo sapiens
aaatttgattggatgagcaga

SEQ ID NO: 1013 - DNA, 26 bp, Homo sapiens
tctagaaatctggtaactttcccttt

SEQ ID NO: 1014 - DNA, 170 bp, Homo sapiens
aaatttgattggatgagcagatattaaatatatatatatcaataagattttctctgtaccattaaataactaactttaaaaaataaagaataattgtcattcatagtagtgtcaaaaatctttaaaatgcctaagaataaactaaaagggaaagttaccagatttctaga

SEQ ID NO: 1015 - DNA, 22 bp, Homo sapiens
tacgcatatatatcctcccaca

SEQ ID NO: 1016 - DNA, 22 bp, Homo sapiens
aaacctcaagggagtgttcttc

SEQ ID NO: 1017 - DNA, 138 bp, Homo sapiens
tacgcatatatatcctcccacatatgtgtgtgtgtgtgtgtgtgtgtgtaaaatgcagtgtttttaggaaaaatataaagaggtcaacttactagctttcaaaactaagaagaaaagaagaacactcccttgaggttt

SEQ ID NO: 1018 - DNA, 27 bp, Homo sapiens
aacagtaaaggaaatttaaatgatgaa

SEQ ID NO: 1019 - DNA, 27 bp, Homo sapiens
aaagcaacttaatttgataagaacgaa

SEQ ID NO: 1020 - DNA, 210 bp, Homo sapiens
aacagtaaaggaaatttaaatgatgaaaataaaatctgccatcttatcaagttcaatgtgactgtaaccttttagttctttgtgtgtgtgtgtgtgtgtgtgtgtgtgtgtgtgtgtttggttggcttttattgatgtatataaaaagattacagacagcaagagaagataatcagaggccttttcgttcttatcaaattaagttgcttt

SEQ ID NO: 1021 - DNA, 27 bp, Homo sapiens
aacagtaaaggaaatttaaatgatgaa

SEQ ID NO: 1022 - DNA, 27 bp, Homo sapiens
aaagcaacttaatttgataagaacgaa

SEQ ID NO: 1023 - DNA, 210 bp, Homo sapiens; identical to SEQ ID NO: 1020

SEQ ID NO: 1024 - DNA, 26 bp, Homo sapiens
tttccttccataaatatttgatatgc

SEQ ID NO: 1025 - DNA, 23 bp, Homo sapiens
aacagcaggtatggtaagcaagt

SEQ ID NO: 1026 - DNA, 153 bp, Homo sapiens
tttccttccataaatatttgatatgcataggagaaagatatatatatatatatgtatttatgtatgtatgtatgtatgtatatgtatgtgagaatgaatggataaataagcattcctctttcatacagttacttgcttaccatacctgctgtt

SEQ ID NO: 1027 - DNA, 21 bp, Homo sapiens
ctgctgtggacatacatggtg

SEQ ID NO: 1028 - DNA, 21 bp, Homo sapiens
ctgccataagacacacacagc

SEQ ID NO: 1029 - DNA, 334 bp, Homo sapiens
ctgctgtggacatacatggtggtcctacacaactggagtttaaatatggatcctgaacagctttcatcagtctgatgcacttccccaatatttgtaatcatgaggagcagagcaaaacaaaggcataaatgttggggtaatattttgttttccaaagaccactgctcaatttgggggaaatttttgaagaaacagcaaaggtaacccttggagtctggattggttggttggttgattgattcattcattcaacaaaaatatattgaacccctgctatatatatgcctgcctcaatactgatgacttgtacgctgctgtgtgtgtcttatggcag

SEQ ID NO: 1030 - DNA, 23 bp, Homo sapiens
ggtttcctgaaagttcagaatgg

SEQ ID NO: 1031 - DNA, 20 bp, Homo sapiens
tggaccctagggaatcagaa

SEQ ID NO: 1032 - DNA, 394 bp, Homo sapiens
ggtttcctgaaagttcagaatggcaggcattaaaagatgcctggggccaggcgcggtggctcatgactgtcatcccagcactttgggaggccaaggtgggtggatcacctgaggtcaggagttcgagaccagcctgaccaacatgatgaaacctcatctctactaaaaatacaaaattagctgggtgtggtggtgcatgcctgtaatctcagctactcgggaggctgaggcaggagaaccactggaacccaggtggtggaggttgcagtgagccaagattgcaccattgcactccaacctgggcaacaagagtgaaacgccatctcaaaaaaaaaaaaaagagagagagagatgcctgtgacagcccatactatttctgattccctagggtcca

SEQ ID NO: 1033 - DNA, 20 bp, Homo sapiens
gaccaatttggatcgctgtc

SEQ ID NO: 1034 - DNA, 20 bp, Homo sapiens
aaacaccagcacaattaccc

SEQ ID NO: 1035 - DNA, 395 bp, Homo sapiens
gaccaatttggatcgctgtcattttccatgaatgtgtctcaggtttttgtttttttaatagagagagttagctgtttcaacctctctttctttcgtctaataactcctcatttttttctccctcttttttcatcttcttcctttctttcagattattggaaactttctcatgttgcagcatttgctgctatcaattatgccagaaaagctttctgtgtactagcagtgttatgggatcgtgtgtgtgtgtgtgtgtgcgcgtgtgtgtgagacagagagagagagagagacagagagagagaggtgggggggagattgagatggaaagagtggcgggggatgaaggaagtgggggagagaaataaatggtgtctggggtaattgtgctggtgttt

SEQ ID NO: 1036 - DNA, 20 bp, Homo sapiens
tagagggccatgctgtatca

SEQ ID NO: 1037 - DNA, 20 bp, Homo sapiens
gtctgtccaaggcctctgtt

SEQ ID NO: 1038 - DNA, 274 bp, Homo sapiens
tagagggccatgctgtatcatggattcattttgaaagagtatttaatgaaaaatataaaagaaggctattcatagcatattgccatttatgaaaatttaaaacacacacacatatatgtaaaacaacacttaatatttttcaaagaaacactccatatccaaagacagatgccagacaattaagtttttgcttatgaaggtttaggaggaaatgggggagtagtgataaagggggtaaaaaaataaaataagccaacagaggccttggacagac

SEQ ID NO: 1039 - DNA, 20 bp, Homo sapiens
tactttggttgccaggaagg

SEQ ID NO: 1040 - DNA, 24 bp, Homo sapiens
gaaagatgaaatcaaacaggaaca

SEQ ID NO: 1041 - DNA, 144 bp, Homo sapiens
tactttggttgccaggaaggctagagccaaatttgcaagatcatctctaatagctgcaaaggaataaatgatatgtgtgtgtgtgtgccagtcttactcctggcattattttcttatctatgttcctgtttgatttcatctttc

SEQ ID NO: 1042 - DNA, 20 bp, Homo sapiens
gcttgatgggaaaggaagaa

SEQ ID NO: 1043 - DNA, 20 bp, Homo sapiens
ggccgtaatgaaagtccatc

SEQ ID NO: 1044 - DNA, 393 bp, Homo sapiens
gcttgatgggaaaggaagaagatagaagtatattttcaaagacctcaactatagaaggtagaaggaaactgatcaaatatgaatttctttattagaaaaaagtggctttaaaaactattttataagtcatattggatactcatgtgcctgtggaacatgcaaaaactctggcctgttgcacagaggtttgattttgaaactgtctaattttatttatttaaatttttttagagacagggtctcactgtgttgcccaggctcttgaactcctgatctcaagcaatcctcctgtctcagcctcccaaagtgctgagattacaagcatgagccactgcacgtggcccaaagtctgtaatttttttcagtaaagattgatggactttcattacggcc

SEQ ID NO: 1045 - DNA, 20 bp, Homo sapiens
gatatgagggagggcaaaca

SEQ ID NO: 1046 - DNA, 20 bp, Homo sapiens
aaggccttgctcaaagaacc

SEQ ID NO: 1047 - DNA, 90 bp, Homo sapiens
gatatgagggagggcaaacaactgcttctacgtgttttgttttgttttaagaactcaaaaaagcatggtaggttctttgagcaaggcctt

SEQ ID NO: 1048 - DNA, 20 bp, Homo sapiens
ttcggagcttctcagtggtt

SEQ ID NO: 1049 - DNA, 20 bp, Homo sapiens
aggcccatagtcctcctctc

SEQ ID NO: 1050 - DNA, 295 bp, Homo sapiens
ttcggagcttctcagtggttaggaatagcttcggacaatttacctaattgggcttcagtttcctgacctgtataaaacaagaggattggtaaatgctctccaacattgcttgaagctcctaggttctctggttactttgttatcgtcataaaatgataatttaaaaattgatgtatatgcatgattttatgtatgtatgttatatatgtatgattgattatacttgcctatgtatggaaaatttcaggttgttaataagaaactcgtttcttttggagaggaggactatgggcct

SEQ ID NO: 1051 - DNA, 2001 bp, Homo sapiens
ctgttgtttcagatgaaacttaatgaccacaccctcccaccccaatggagattgaaacagttggagaaactttagtttgaaaaatatttactttaaactaaactccaggaatcttttttttttttttccccttggtgagaaagatattctcaggtctattcggagatagcaatatctttaaaatcatgcaagaaacaaaatttcggagcttctcagtggttaggaatagcttcggacaatttacctaattgggcttcagtttcctgacctgtataaaacaagaggattggtaaatgctctccaacattgcttgaagctcctaggttctctggttactttgttatcgtcataaaatgataatttaaaaattgatgtatatgcatgattttatgtatgtatgttatatatgtatgattgattatacttgcctatgtatggaaaatttcaggttgttaataagaaactcgtttcttttggagaggaggactatgggcctgggggtcaggatgggagaattttgcattattttatactttctgtttgcttgttttttactaagtatgcattgtttaaagattttaaaaatagattggttttgttattattttaaaaggatgaaaggaagactttcaaattattgtaaaatctatacccaggataataataattggaatttcatttcagactccaagtttaaagtatttgtaattataagtagacttttgcttttattatagtaagaaaagtcttttaaattctcttcttcaatgaaagcaaccacttttgtttggtgaaacaagcagcatttacaagcacagaaacaaggtttagcaatattagtgacaggattatataccttctatttattgggtcctctaaaagatcatcttcctttgatttgcaactatgggaatgaaatagaagtgggaaaaattagcttttaaaccaattagttagtaatgactagtgccaagtttaaagtgtttcagagtgttattgccgtgttttaaatgtaaaacactagctccctcttaatctttttagaagataaaactgcaggaaatgaaaaagtggtcagttgaaacagcagaaggcattttagaggctgcatatagtaactggacttggattttggtttgagcattcgttttgttctattttcctatttttacaaatatttgtattaggttttgagaaactataagaacccagaaactagatgtttctagcttgacatatttgtggggttctttttatttttatcatttctacttttgtttcttacttaaaaaaatgaacttaaggaaatatacagaaaaaataactcaacaatcattttcatttaaaaaaaattagagtactttctagcatggttaatatatcattataatcaatatgaagtagatgtggtaggtttttttatttccagttgttctgtcaaaccttgaacattttgccctatctggcacaatgttttctagccttttccatattcaacaatgtcaagtaagtaaaagttaatttaaaatgaacttcagtgtttgtgtcacattggagttgttaaagttctcctttgttctttccaggtttgcattgcctctggctaaatttatttgtatttccattccatgcagggtatggtagcactgtgattcagcttacttagtacttcattggaacgttgggttatttatgctaaagtcaataatctcatagtgatgatgatgatgataaccattgctgtcacttattgagtccttacttttggtagatactacattagacttttaaaaaactcatttaatgggtattcattgaacaccttttatgccccaggcattgatttaggagccaaatacataatagttaacaagacaaagtcctggcccataaatatattgtttctaatccacataaaaccttgcaaggcaggtattgtcttaattttatagatgagaaaactgaggctacagaaggagaacaaagttttcagcattttat

SEQ ID NO: 1052 - DNA, 19 bp, Homo sapiens
tgcattgcctctggctaaa

SEQ ID NO: 1053 - DNA, 22 bp, Homo sapiens
tcaataagtgacagcaatggtt

SEQ ID NO: 1054 - DNA, 165 bp, Homo sapiens
tgcattgcctctggctaaatttatttgtatttccattccatgcagggtatggtagcactgtgattcagcttacttagtacttcattggaacgttgggttatttatgctaaagtcaataatctcatagtgatgatgatgatgataaccattgctgtcacttattga

SEQ ID NO: 1055 - DNA, 2001 bp, Homo sapiens
ggtaaataattgaaatttgagtgtgatcttagttgttgtgtggtgtatttgactggtggaaattattggagagtcagcatgagatgttgtcatgcagtcagtggtatgtgaattttagggttttattagggaactgcaagactaacagtaagaccaacatgctttgtgattttatttgctgatattctgaatttacctgagtttcatacataaagctctgtacatttaaaaggttaaaaaaaaaaaaaaaaagaaactaggttttcaagttggtaatggtttcagactgtctatgtaaagcataagtagcatgatttgaagtgattcattcaaaaaatgtataaaatcagagtaatagaagctaaattactcaaatcttgctcagatataaaattttttttcagctttcataggaatctgcccttcgattagtgagaaaatacggtcttctgttgaagcagagaatttgacagtcatgacattatattgtgaacctttaagttttactgctttattttctgtaaattactacatttctatagtaatttcgcagtgtaaatgctgaatgaatgtgattagctatatttgcaggcttagagcatctgtgaatacttcctggtttttggttagttgtgtttattcctagttctatgtcctattgaattggactttgcttatttaaagaaaagtctataaagctacaggcaagaaaagttggaatttcttccttggggaaatctcaaatgtagagttttaagtaaatattaaggttcaaaatgggcaatataatgagcacatttgaggaatttgtaagtatttatgtaacacttcatgtttacaaaatgttttacagccatattcattaatttacataagtcccttggaaggtaacaatgttattacatgtgttttattaagcaagacaggtaaaatttaggcaaattaagtggcagaaaggaagagacattaaaacatttattctgtgacttgcgcctatatcatagagcgtgctcctgcattagggaaataaagaaataaaatgcttctcttttgttatagacttgatcatggtgcctatttgggtaattgtttatatatattcatatagttttatatattttttattttttgattatgagacacaaaggccttccaacacaaatttcaatgtatgaaatatctcaacttaatagctgaaggataagatcctgggttataaattctccattaaatgttgcagttatcatgatcaacagattggtgaatatgtctggtggctgctcagtattggtctagatagaatatactatgggaccaaaaaagatatgaccgtggagagctcactttggtggccacacactgcctgcaggctgcttgttctctgccactctgttttttgggaggactttcctttccctctcatagaatagcaaatttctgctaaaaagtaataaatttgctcaaaatatcaaaaaggtacgattagaatatcttccatagtaaaagagattaaaaataacctagactcttgcattagaaagcagagggagacatgacaaattattgcattcaattaacttttcttttacttactgagtgcccagaaattgctttaacaccctgaggtgtgaccataaggtaatgaggagtgatttttaaaaataaatataccataaggtacactgtttaaatgagtgctattcttcaatgtagccactctttacactaatccaacgatgctgtcattgcaagaaatatttttagaacttgtcctttcgaattgccgttagaagccatttatggactatagaagaaaacagtctcacattgacttaaagtcgcactacattttttaaatcaacccctcccctgcaaagaaatttattacccaaatagattactgaccttttcactaacctttgttctgcatttttttcttttcaaaatcagttctataatttaaaaaataacaatttgccatcaacaaggatatttatttcc

SEQ ID NO: 1056 - DNA, 24 bp, Homo sapiens
tgatttctcatttgatttgatcct

SEQ ID NO: 1057 - DNA, 25 bp, Homo sapiens
cagataaagttcctgaaatgaatga

SEQ ID NO: 1058 - DNA, 115 bp, Homo sapiens
tgatttctcatttgatttgatcctcatttataatagctcgtgtgtgtgttgtgtgcatgtgtatgtgtgtgcacatgtgtgtgtgtgtgttcattcatttcaggaactttatctg

SEQ ID NO: 1059 - DNA, 20 bp, Homo sapiens
agaacattgcggtgggacta

SEQ ID NO: 1060 - DNA, 20 bp, Homo sapiens
gttgcccccaaggatttatt

SEQ ID NO: 1061 - DNA, 297 bp, Homo sapiens
agaacattgcggtgggactagaccaatttttgtaaaatgtattaagctacaataacttaaagactgtggtgctggtatagatagttaaatggaaaaaaatgggacatccaaaaataaatgtggaaggagtataagatatatatacatatcttatatatatatatttcacataagataatgttggcattgcatatcacaataaacactggagcattcaataaatcttaccattaggcaaagaaatggagttgaatttatatcttaagccttatccaaaaataaatccttgggggcaac

SEQ ID NO: 1062 - DNA, 21 bp, Homo sapiens
agcagaggactggaaacaact

SEQ ID NO: 1063 - DNA, 19 bp, Homo sapiens
gaacaggcaaagcctgaaa

SEQ ID NO: 1064 - DNA, 365 bp, Homo sapiens
agcagaggactggaaacaacttaattgtcatcaataggagactgaatcagtatattatggtactccatggaatatactgtgcaacttgttaaaagaatgaagaagttctgcagtggtaatggaacaaaatccaagatgcattattaaataaagcaaaatgagaacagtatgtctaacatgctctcctttgtataaaacaaacacacacacacacacacacagacacacacacacaaatgcatagcttatctttgttgtaaggttgtttccaggggggggttttgctgtgtgagaaacaggaaaaagagactttcttttcagtgcaaatccttttatgttttatcattttcaggctttgcctgttc

SEQ ID NO: 1065 - DNA, 21 bp, Homo sapiens
agcagaggactggaaacaact

SEQ ID NO: 1066 - DNA, 19 bp, Homo sapiens
gaacaggcaaagcctgaaa

SEQ ID NO: 1067 - DNA, 365 bp, Homo sapiens; identical to SEQ ID NO: 1064

SEQ ID NO: 1068 - DNA, 20 bp, Homo sapiens
agtgaatggtggccttgagt

SEQ ID NO: 1069 - DNA, 25 bp, Homo sapiens
gagtgaataagcaacatatccttcc

SEQ ID NO: 1070 - DNA, 263 bp, Homo sapiens
agtgaatggtggccttgagtatatgaatgggaaatataggggctcatattccagttagcggtactgtatagtgataattcataaataacaattgtacattgtaacacacacacacacacacacacacacacacacacacacacacacacacacatacacacagtaatgctttttgtccctggaaaaccacaagtaacaatgaagtattctgctttattatgttgatatcatcatgataggaaggatatgttgcttattcactc

SEQ ID NO: 1071 - DNA, 20 bp, Homo sapiens
ctggttccagggagagagaa

SEQ ID NO: 1072 - DNA, 20 bp, Homo sapiens
cctttccctgtggagatgaa

SEQ ID NO: 1073 - DNA, 159 bp, Homo sapiens
ctggttccagggagagagaatactagttttgtttatttgtttgtttccagacaatttgctatgtcatcactttttttgtgtgtgcatgcgccaagtgtttgaggttgataatgttgacagagtccttgcagaatggaagttcatctccacagggaaagg

SEQ ID NO: 1074 - DNA, 21 bp, Homo sapiens
tgacagagtccttgcagaatg

SEQ ID NO: 1075 - DNA, 20 bp, Homo sapiens
aactgagccttctgggcata

SEQ ID NO: 1076 - DNA, 336 bp, Homo sapiens
tgacagagtccttgcagaatggaagttcatctccacagggaaaggctttgtatttcaagttttaaaattccaaaatattttgctataacattgttattcctagttttttatgcctttttgtgtggaaggttggtttctcctttatctacttaccagcttttaggggaatccctttttaagtcaagaaagcaccttagaaaatttctctctctctctctctctctctctctctctctctctctctgcctttatgaaactgacagtagcatatcttgctattcttgggtcttagtttggaattaagctgtgcatgcagtatgcccagaaggctcagtt

SEQ ID NO: 1077 - DNA, 21 bp, Homo sapiens
tgacagagtccttgcagaatg

SEQ ID NO: 1078 - DNA, 20 bp, Homo sapiens
aactgagccttctgggcata

SEQ ID NO: 1079 - DNA, 336 bp, Homo sapiens; identical to SEQ ID NO: 1076

SEQ ID NO: 1080 - DNA, 20 bp, Homo sapiens
aagggatggcattgtgaaag

SEQ ID NO: 1081 - DNA, 20 bp, Homo sapiens
catctggattgctgcttctg

SEQ ID NO: 1082 - DNA, 284 bp, Homo sapiens
aagggatggcattgtgaaagatggggatactatatagaagtaataaaataaaaggtatggaattaggtagtgtaagaatttcagaactaaaatagtctgagaagtcatttggaacatggatttcttttgacagaaaacttctgtcctgcagtatatcagccttgtccagcagagctggttagtgcagatagaagaacctaggttgcttaactaccagttcactgtcctttctattatattgtaattctgttttctgtcttatttcagaagcagcaatccagatg

SEQ ID NO: 1083 - DNA, 20 bp, Homo sapiens
ttcagaagcagcaatccaga

SEQ ID NO: 1084 - DNA, 20 bp, Homo sapiens
cccaatgcctgactcctatg

SEQ ID NO: 1085 - DNA, 175 bp, Homo sapiens
ttcagaagcagcaatccagatgagctctacatcctgaataaaaacaataataatggcaataacaaactattatttttttaagaaatatgacttaaacctatttgtttttatttatttggtttgtttgtttatttatatgtagtttgtcagaaaaccataggagtcaggcattggg

SEQ ID NO: 1086 - DNA, 26 bp, Homo sapiens
tttgctttaatctactaaatcccttt

SEQ ID NO: 1087 - DNA, 20 bp, Homo sapiens
tgtttgccaccattgtttgt

SEQ ID NO: 1088 - DNA, 118 bp, Homo sapiens
tttgctttaatctactaaatccctttttcagccttctggcaataaaataaaatcaacctatggaacctttataagcaaacccatactattggccacttacaaacaatggtggcaaaca

SEQ ID NO: 1089 - DNA, 27 bp, Homo sapiens
aaacaatttactttgcattccttattt

SEQ ID NO: 1090 - DNA, 21 bp, Homo sapiens
ttcagggaacttcaccaatgt

SEQ ID NO: 1091 - DNA, 251 bp, Homo sapiens
aaacaatttactttgcattccttatttatataaatgccttagagcatttcctttcctttaataaaatcatgaagactatcacctggtaatgaaattgttaggatggaagagaaatgaactaggcacagtgtacgtgaatttgattattgccttttcaactgtctaataatgggagctgtgggctcataggctctccttttgaattgtgaaaactatacttattttatactacattggtgaagttccctgaa

SEQ ID NO: 1092 - DNA, 21 bp, Homo sapiens
tgtgagaactggcatgaaaca

SEQ ID NO: 1093 - DNA, 20 bp, Homo sapiens
tgccgagatcattgtaaagg

SEQ ID NO: 1094 - DNA, 384 bp, Homo sapiens
tgtgagaactggcatgaaacagactcattatttcacactagccaacaaaacagtattttatcaaagtaacttctagtcagtccaagactggactggatttgtactggtaacctggtggtgcagggctctaagtctcatgccagctcttgtctccctcattaaacttccttttttagtaatgattaaaaacaactctctttactacaatatattttctcattggctttatactcgaagttgcaagtactttataaaattatttttagttttgcatgctgtataataatccatctaatttggtaagcatagtacataaaagaaatagctgaaaggctttagagaaagttccctactcatacctccccctttacaatgatctcggca

SEQ ID NO: 1095 - DNA, 22 bp, Homo sapiens
ggattcaagactacagcgtcct

SEQ ID NO: 1096 - DNA, 24 bp, Homo sapiens
tgaaaggtaatcactgcctacaaa

SEQ ID NO: 1097 - DNA, 423 bp, Homo sapiens
ggattcaagactacagcgtcctatttttttttgtttgtttgtttttgttttgagatggagtttcactcctgttgcccagtctggagtgcaatggcagcaatctcagctcactgcaacctctgcctcccgggttcaagtgattctcctgcctcagcctcccaagtagctgggattacaggcgcccaccaccacacccagctaattttttgtatttttagtagagacagtgtttcaccatgttggcccggctcgtctcaaactcctgacctcaggtgatccacccacctcggcctcccaaagtgctgggattacaggcataagaaccgcacccagcctacagtgtcttttactaggaattgtaattttattagtttctaaagaaaatattaaatgcagtgttttgtaggcagtgattacctttca

SEQ ID NO: 1098 - DNA, 2001 bp, Homo sapiens
cttatttggagaaaaggattcaagactacagcgtcctatttttttttgtttgtttgtttttgttttgagatggagtttcactcctgttgcccagtctggagtgcaatggcagcaatctcagctcactgcaacctctgcctcccgggttcaagtgattctcctgcctcagcctcccaagtagctgggattacaggcgcccaccaccacacccagctaattttttgtatttttagtagagacagtgtttcaccatgttggcccggctcgtctcaaactcctgacctcaggtgatccacccacctcggcctcccaaagtgctgggattacaggcataagaaccgcacccagcctacagtgtcttttactaggaattgtaattttattagtttctaaagaaaatattaaatgcagtgttttgtaggcagtgattacctttcatcttgtttgtcatatttctcattctttttttgtgtgtgtgacggagtctcgctctgtcgcccaggctggagtgcaatggggcgatctcggttcactttaacctctgcctccggggttcaagagattctcctgcctcagcctcccaagtaactgggattgcagatgcccaccaccaagccctgctaatttttgtatttttagtagatacaaggtttcaccatgttggccagcctggtttcgaactcctgacctcaagtgatccacccacctcagcctcccaaagtgctgggattacaggtgtgagccaccacacccagccatatttctcattcttattttaggctgatgaaaatactaaatatttcaacacctctgtatcatagccatgtttaaatgtgcatatccaccagtcaattttaatacattcctttctagtaaattctgttaggtcttcagttcaactgtacctccctcagtgtcactttttaccttccctcctcccttaaatcgcctagttctcattttgaaaaggtagagaaatcctttgtcagtagttaggaggatgtagatcctgtatgattttctgtcattacattcttaatctattacatgtgtatttgtcccgtccttactgacttaacctctgaccacattgcaaaatgtaaacagagccagataccgacaggtttgtcccttcattagccagggcccaattcataatttctattttctaatttggagaataagaaggttagctagattaagaggctttcctaagtcacataaccgtttgcaagtagctaagaacaggattgtgaactcttgccaaactcctccataaaattccataagcttgtgggagctcatttatacaatatttaagaggttatataggcaaggagaataattgaatttctatatatttagattgactgatatttcccaaacttcaagtggaaaaaaaaagcccttaaagaaagagcttaagagaattaaaatgatgtgacccgaaccatggttcctttctcattcaattattttcttttaaccactgatggctttttgtgcttggctgggtaactttctagctagtcaagcctatgttatgaaagagaaataagacacttaatcctgtgaatgattaactagtattggcctcccttcccagtagtttgcccttcctgtattgtagtctgtgtactcatttctgagccaaatctccaaggtctcttattattgagtgtagggacacctggattacagggagttaggcctttgttttagtctgaagatgatgtggctaattatacagctccaggcatttgcattttttcaaggcattttaaagtttattgcttgtgaaaacctagtttgtaaagtatcatttttaaattttacaggtgaagaagtagaactcagagaagttttacttgccaaaagttctgcagcaagtcagtggcaaattcaaataagtgtacactcatgtatacttagctcagtgtttaactcatggaggtattgttttgtttcttatttataatataaagccaagtagggctggct

SEQ ID NO: 1099 - DNA, 21 bp, Homo sapiens
caaaggcataaccttgacaga

SEQ ID NO: 1100 - DNA, 20 bp, Homo sapiens
acgttgatccaatccagtgc

SEQ ID NO: 1101 - DNA, 218 bp, Homo sapiens
caaaggcataaccttgacagatctcagtgtctccaggctaagagaagagcaacttagatatagtaccttgagcctttcaatgattgctgtttaaaaagtatatgactgtaggataggatacattggaaatactgaacaatgctggaggaaagccaacagcatgtggataagaccatccaatggggccaagatgagggggcactggattggatcaacgt

SEQ ID NO: 1102 - DNA, 20 bp, Homo sapiens
tggtgagtggtttccttgct

SEQ ID NO: 1103 - DNA, 22 bp, Homo sapiens
tttatcccaatcagattcttgc

SEQ ID NO: 1104 - DNA, 140 bp, Homo sapiens
tggtgagtggtttccttgctgcgctagtatgcggcagatgtttctcatgtatccctaggttttcaggctttttcttttcaggatgaggctctgttgtcttttctttttttctttcttggcaagaatctgattgggataaa

SEQ ID NO: 1105 - DNA, 20 bp, Homo sapiens
gggtgagctctgtgctgagt

SEQ ID NO: 1106 - DNA, 20 bp, Homo sapiens
gtggcacacggtcaagacta

SEQ ID NO: 1107 - DNA, 382 bp, Homo sapiens
gggtgagctctgtgctgagttatacttcaagatgtacaggacagagttagggaaatgtgagaccaagggcttttctgggcaggaacaaccatactggctgctgtggcaaggttagagcctgccaggtaactacagtgagacttccttttcatacagattgggggaactggcaagacaagttatcatcacctccacatagcaggtgagggaagggaagcaacagcagaggcattggtgttttgtatttagaagggcacatagcctaatgctaaaactcacccattagttacatcaatgtttggatgctctttgaaagacttctcaggagaggtgtgagaatgatttgatttgaaggtgggttttagtcttgaccgtgtgccac

SEQ ID NO: 1108 - DNA, 20 bp, Homo sapiens
cagcagaggcattggtgttt

SEQ ID NO: 1109 - DNA, 20 bp, Homo sapiens
gtggcacacggtcaagacta

SEQ ID NO: 1110 - DNA, 162 bp, Homo sapiens
cagcagaggcattggtgttttgtatttagaagggcacatagcctaatgctaaaactcacccattagttacatcaatgtttggatgctctttgaaagacttctcaggagaggtgtgagaatgatttgatttgaaggtgggttttagtcttgaccgtgtgccac

SEQ ID NO: 1111 - DNA, 21 bp, Homo sapiens
gcaggatttgcttgaacagag

SEQ ID NO: 1112 - DNA, 20 bp, Homo sapiens
gcatgtttgcaaatgcctta

SEQ ID NO: 1113 - DNA, 382 bp, Homo sapiens
gcaggatttgcttgaacagagaatatgtgagttctgtaacttttaatattcaattcaatttaaattctttttcatatgtcctttttatatattccagtttctgattatgggtaacctgacttgaaggtcagaccatctgaagtgaagatggttaaattgtatgtgtttgcacatgcatacacgtgtgtgtgtgtgtgcatgcatccacatacacatgggtgttcatgtggtaaaggagagccagagagatgtttaatttcctcaccacattgtagaaactgaaagagacatgtactgcagaaacaaattctgagatacgtttgctaaccacttttttaggtttcaccttccggggaaaatgttaaggcatttgcaaacatgc

SEQ ID NO: 1114 - DNA, 22 bp, Homo sapiens
aaggtcagaccatctgaagtga

SEQ ID NO: 1115 - DNA, 21 bp, Homo sapiens
ctctggctctcctttaccaca

SEQ ID NO: 1116 - DNA, 123 bp, Homo sapiens
aaggtcagaccatctgaagtgaagatggttaaattgtatgtgtttgcacatgcatacacgtgtgtgtgtgtgtgcatgcatccacatacacatgggtgttcatgtggtaaaggagagccagag

SEQ ID NO: 1117 - DNA, 23 bp, Homo sapiens
gaggcttcctagtatgagggaaa

SEQ ID NO: 1118 - DNA, 22 bp, Homo sapiens
ggagtacactcccagtgcataa

SEQ ID NO: 1119 - DNA, 233 bp, Homo sapiens
gaggcttcctagtatgagggaaagtgttcatgagttttagtcctagctttgactctcattacacatgtgaaaattttctcatctttaaacaggcttaaatacaaagaataactgaaaaatattggaaacctaagtggttataatgttgtatctagcagtgggactaggagtgattctttgtttggtttggttctgtttttatttccaaattttatgcactgggagtgtactcc

SEQ ID NO: 1120 - DNA, 20 bp, Homo sapiens
tccgtgatttcagtggtaca

SEQ ID NO: 1121 - DNA, 21 bp, Homo sapiens
gcaactgcttctgaaagatca

SEQ ID NO: 1122 - DNA, 307 bp, Homo sapiens
tccgtgatttcagtggtacatgtcttacaaagttaaaaaggagagctggatagtgatttctttttttttttctttgttgttcttcttttttctttttccttcttcccttcttcctttttttcttcctcctcctccctccattacctcctcccttctgtccctcctcccccctcctcctttctccccttctctccttgtttttccctcctcccccttccctttctcccatctttcttctttctcctcttctttcttcttcttttaggtaagaaagagttttttggaatgatctttcagaagcagttgc

SEQ ID NO: 1123 - DNA, 2001 bp, Homo sapiens
ataacctgagtggtttactcagactgttcacaaatgtttggacatcattcaagggctgtccaagtctgactagttagctttatgatatactcagatacactcagattcacctttataccatccaatcacatttaaaggagggtgtttcctgaaattgcaacattactgacttcccagccatgtgacatagcttttcagactctaagttaaattttaacccagacatctctcttcaattcaggtcacctacaggccagacaaagccaaggtcatgtattgagtgaatataaggagttttgttggttctaataactgtaatgttattcactggttgaaatactataccatggttaatcataagttgcagctgttgtgtccttttatttatgagcccttaatcaagaggacacagcaagagccactgtttgaaaggagcctttcatgaggtcttctctttgggtgctccttcttgtttcattgtgaaaagaagagaagtttatattgccttgcaaaagttattaaatagtatatgttggcttctctgaaaacagatttttctattccaaatttgaaagatcaaattataatctttatatttcagctgatgataatagaaacactaagcctgtgctctccaaacaatgtcttttaattggtgccaagtttgattgaatctcaatatcagccatcagaagttatatgttggctctctgaaaacagactttcctatccagaattcaggttttctatttgtgacaatatgtctctgctgatgttaaggtaaacagaccagagctctttgtgcagccctttttactggtcctgaacctgatgaatgagattttaaatgtaagtcaatctctctctccttttttaactttttggttttaaatcctcccttattttatgagaattcatcttatgagttacccttgttaaaatattggcatatccaggagtttgaatagggtcattttctgaatggattttggaataattacgtaaattgatttttctgatcaaggaatttagtgataggttatattttcaaatgtgttgattgtcagcttcatcctaaattgcaatgtaacacaaaagctggtacacagctcttttctttgagacactcaaaatgtttccaaactttaaattcatactttttactgataacatttttgtggatctcattcaggtaaacttttcttcttcacttgttgatcccgcgtgacccctccagccacacaggtttcatgtgcttccctgaatacagcatgcacttagcaccctttatagcctggatagtgttgttaccccagactagaattctttcctcatctccattacaatacttgacatccttcaagacaacactcaaatgctacttatatcattaaatttcctccctgatttctacttggacttaaatgttgctctttgtaccactttatttgacctgttgctgaagcacttagttcactgtaccttgtattttaattgattttgtacatgttttttccctcaacaagaagcaaacttattgaggtctgggaccatatcttcaagcagcctccagataattggcttggcacaaaattgcatgcatctcttgttttctcataactggatggaaacaatgatatttagatttatcagaactgctacagagggctaaagggatgcaaaaacacttggtaaaattcaaaattctctttaaagtagtcagtattgttctcaaaacaattacatcaaacttttagtgactgaagtgttgtaataatttgtgattttcaaagatactcaaaatttaaggtgaacagtgagccagaacacaagatgatatacctaatctcattcaccagtctgttttgaccaagtcaagttgaggcaagaatgctgggaacaagcttttctgattgaatgtgttaatttagcccgccttcaaacttcttaaccaatggcttccactctaccacctttcaacgcttttttttctgtaagatg

SEQ ID NO: 1124 - DNA, 23 bp, Homo sapiens
ttgatttgctattccttgacctt

SEQ ID NO: 1125 - DNA, 20 bp, Homo sapiens
cgaatgggagtgaacaaatg

SEQ ID NO: 1126 - DNA, 337 bp, Homo sapiens
ttgatttgctattccttgaccttaagaactatagaacactttattttctcctaagaccacttttttgtttttattttactccattcattaattcattcagcacataataacgaagtatgtacttggtggcaagcactgtggtaggacctggggatatgaagttgaagaagacctgggccatatctctaaaaaccttgtgaggggaaaccaagggggaaaaagtttctactattttaaataattagaatagattttattttatagttaaatttgaagaaaactacaattttagttagatttactatgccatctttactcatttgttcactcccattcg

SEQ ID NO: 1127 - DNA, 2001 bp, Homo sapiens
aataaggttgttttgccttcttatcattcatgtgttcattggagtagcacttctaatttccttcatgaacttttgctttgcattcataacttggccaactgtttggcacaagaggcctagcttcctgcctgattcagcttttgactttccctcactaagctaaattatctctaacttttgatttaaaatgagagaagtgtgattctttctttcacttgaacacttagaggctattgtaaggttattaattgaactaatttcaatattggtattgtctcagggaatagagaggcccaaggagtgggaaaaagatggggaaatagctggccaatggagcagtcagaatacacatatttatcaattaaatttgctgtcatatatgagtgtagttcatggcacccacaaacaatgacaagaataacatcaaagatcactgatcacaggtcaccataataacataatcataattgaaaaagttagaaatattgtgagaattaccaaatatcacacagagacatgcatgagcacatgctattggaaaaatggcactaatagacttgtttgatgcagagttgccacaaccttcaatttgtaaaagttgaagtatctgtgaagcacgataaagtggagtacaataaagtaaggtatgtctctagtgtgtttgtgtacattaagtggtggaagatgtgatttaattttttaaaaaatagccgtttaccctagataaatcagtaagagatgagtacaagtatgtatctacaaattatttttatttgtgctctttataagaattaaaaattgaaaaactcccaaataattaatgaagtaaattatctttcaagtatacactgtattgttctatagctattaaaaatcatattgtataaaaatatttattcaaatggggaaatactcatgatataggaagaagtgaaaagtaggttataaaacagaatgtatagtatggtccccattttgggaaatatatttacacttatgaaaataaaaaaatcagacaggatacataatgagttgttagcagtggttatatatactctgagaccatgagttattttgatttttgagaggcgagtgtgcttgttggtgttttcaactctttcctaccataaaatgtattaattcactattcaatttttttaagttctaagaagttagacacttatttattttaggtgttatacagtccatagtggaaatttgagatgagtgacagaatgaaaataatatggttgcagacaaatgtgataaatatgtgtaagatgtttttgaatagacaaagcctattttaggagtgatgaattgtagcaataatttattgtaaaatgatagatgtttgaaatagggtgggagtggtaggaattcaaaggaagggatagatatgaaacatgaaggatgaatgggcagtatgtggtgaaatggctctgagaggtgagagagagaagactcttgaggacaagtgcaatgtttcaacctgcttaggataataaagccaataaaagatagagacagcttgtttgggggctgagataaaaggtttcaatccaggcttttttggttgttttttgtgttgttttcttttcttttcttttcttttttttttactttttatttggaagtaagaaagttgcaagaatgaaaacagtccacataacagtcaaatacctttacccatattcacctgttgctaatattttaccacatttgctttataatttactcgatctacatatgcatatatatgtataatatttttctgagccatttgaggctaaattacattcatcatgattctatacccccaaatacttcggtgtggtatttccaagaaaggggatattctgttatataaccttagtagagttatcaactttggtaaatttgattaaatacttctatctaatctaccatttatatgccagttttgtcagttggctcaaagatacaatagtgttgtttataacactttttccctccagcata

SEQ ID NO: 1128 - DNA, 21 bp, Homo sapiens
agtgcaatgtttcaacctgct

SEQ ID NO: 1129 - DNA, 22 bp, Homo sapiens
gcaacaggtgaatatgggtaaa

SEQ ID NO: 1130 - DNA, 230 bp, Homo sapiens
agtgcaatgtttcaacctgcttaggataataaagccaataaaagatagagacagcttgtttgggggctgagataaaaggtttcaatccaggcttttttggttgttttttgtgttgttttcttttcttttcttttcttttttttttactttttatttggaagtaagaaagttgcaagaatgaaaacagtccacataacagtcaaatacctttacccatattcacctgttgc

SEQ ID NO: 1131 - DNA, 21 bp, Homo sapiens
agtgcaatgtttcaacctgct

SEQ ID NO: 1132 - DNA, 22 bp, Homo sapiens
gcaacaggtgaatatgggtaaa

SEQ ID NO: 1133 - DNA, 230 bp, Homo sapiens; identical to SEQ ID NO: 1130

SEQ ID NO: 1134 - DNA, 20 bp, Homo sapiens
gttctgggcataggtgtgct

SEQ ID NO: 1135 - DNA, 20 bp, Homo sapiens
atgcttcaccctgtcatgtg

SEQ ID NO: 1136 - DNA, 335 bp, Homo sapiens
gttctgggcataggtgtgctcattactattgaggtatcttggctcttggctctttcagtgaagtgaacttggggaaaaatacacacacacacacacatacatatatatataaatacacacacatatacacctacatatgcatatatgcatattttagaaatcatgaattgattcattgatatctccaattttaattcattcccacaggtttcttacttgcccaattcagttttacatggcttctgaatttgaaataataaggcaaaatggtagagatgttcagcttgcagtgggggaagatagaaaatcgaaattcacatgacagggtgaagcat

SEQ ID NO: 1137 - DNA, 20 bp, Homo sapiens
cccagtttggagatcaggaa

SEQ ID NO: 1138 - DNA, 24 bp, Homo sapiens
tgagtgctagagtggaattgttct

SEQ ID NO: 1139 - DNA, 122 bp, Homo sapiens
cccagtttggagatcaggaagattttgtcatccttcacattgcaagacttgaagacttgtaactcaaaatggtatatttttttcttttcttccaatagagaacaattccactctagcactca

SEQ ID NO: 1140 - DNA, 20 bp, Homo sapiens
atatggtcgcccacaaagag

SEQ ID NO: 1141 - DNA, 20 bp, Homo sapiens
aggcacatgtttgagtgtgg

SEQ ID NO: 1142 - DNA, 247 bp, Homo sapiens
atatggtcgcccacaaagagcaagtaggtcacttcaccaaacagaattctgtatgtattacagaaactcccaggctgagtcaccaagtaaaatgaagggcagtgtgctctatttaaaatgttcatttcattttcgcattccattctttactaacagaatggtttcacttcatttccagtcactttcattttcaggttgtcaagcttcacttagtgtcagttgtgttcccacactcaaacatgtgcct

SEQ ID NO: 1143 - DNA, 2001 bp, Homo sapiens
gaatatctttagaatagttctatagttaggaacgttgagaccaggtaacaagggatttattcaatgggatgacaatttttatacaccatgcctgaagcaaataaaggtgatcagtatttatattgcagtattcaaatactctggagccaaatagataggactaccttaaaaatgttcttgtacatgtgggtttgatcttaaagatattagggatggtaacataccattctatgtatatacatgaccaggccttaggttacttaagggtgatggaatgaccattgtgtgtgtcttgtgtcttggtggccttcagtgaattctgcatgagctctagtagtaactgccactgctgtagtatcatggaaaaaacactgaacttaaaatagttttcttacctgtaacaaaatggacaacaatctcacagagtttgtgtgagaattaaaggagaaaatacttgggaagaagtgctttgaaatctccattgcactctgcaaaagcaaggaaatgcgcttgtcatcagtatcatgttgacgtggagtgagttactccccagctgttcacgatatggtcgcccacaaagagcaagtaggtcacttcaccaaacagaattctgtatgtattacagaaactcccaggctgagtcaccaagtaaaatgaagggcagtgtgctctatttaaaatgttcatttcattttcgcattccattctttactaacagaatggtttcacttcatttccagtcactttcattttcaggttgtcaagcttcacttagtgtcagttgtgttcccacactcaaacatgtgccttgtcttccttgatcttctctctgaggatgtttctctgactaatgtgctgtggtcagaacaagagcattgccacatggtgcatttcctaggtaggcatgtctaaaatcattaagtggcctagctcagaacattctttgtgaccctttcccctccccacccagtgcctagtgactgatttatctgaatataagcctacttccacttttagttcaagggccttgctccctgcctgcaagaatctctctaatcacattgccctccctccacccgctttccccattgaaaccaatgtttggagaagatagaagaatgaaaagaacatctcaggtcctgtttttgtaccaccttcactattgtagcacctcttttgtgttgccaactgaatatggtatacatggctttaagggggaaaaaagaaaaataaaacataagaaagtaggagagctcctagctttcttaaatgaattaaaggccttaggccagagtgaattatattatagattgtagactagatatggtggggaaggttactcaacaacttggttgggaaataaattaatatataaaaccatcagatatcagagcatagttgtggaaagtcacctaaggaaagtcattgtctctaggccaaagactggcctagacgtaagtaatgcaccagtgtgtcagaaagggggttggtcgacatcagaagcacccagaggcaaacactggttgtgccctgtacccacagtaactgtccatagaaatgtgaatgttggtagtcttcaaagtttcagtgtcactggcaagtccttctttgttggaaattcaatttaacattcaagttctatagcaaatgcctcttattatgatgtcttgtgtttacagtttgcctctgtaagtagaaccctctaaagggaaaaatgctctggtcagattgttatggtctgtatgacagatacataactgttgtaaatcaacacattggcattctcgtttgctccaccagtttgttgtgaacttcgtcaggggaaggcatcatgcctaagtctattcaactctgggatactgacaaggtcaaatttctgtgcctgcaaggctgggactggacccaagctgtacagttcatacaatgaaatagtgccatttagtaaaaaagggagataatatggcacttggttggaagtttggctctagaatctgattgaac

SEQ ID NO: 1144 - DNA, 20 bp, Homo sapiens
tcaaatttctgtgcctgcaa

SEQ ID NO: 1145 - DNA, 20 bp, Homo sapiens
aaactgctgaccacccaaag

SEQ ID NO: 1146 - DNA, 365 bp, Homo sapiens
tcaaatttctgtgcctgcaaggctgggactggacccaagctgtacagttcatacaatgaaatagtgccatttagtaaaaaagggagataatatggcacttggttggaagtttggctctagaatctgattgaactgggtttgaatactaggtcagccacttacatgctgtatgacctaagaccccgctctaaaaaggatattatctttacactgacctcagagggctgttttgagaattaaattagacaatccatgtaaaatacttgactcagagccttacatagagctgttagcagcagcaacaacagcagcaccagcagcaaggtaaataccaccatgtgtgtcctttgggtggtcagcagttt

SEQ ID NO: 1147 - DNA, 20 bp, Homo sapiens
tctgaaatgtttggcctctg

SEQ ID NO: 1148 - DNA, 24 bp, Homo sapiens
tttatgcgtgtcttaactgatttc

SEQ ID NO: 1149 - DNA, 140 bp, Homo sapiens
tctgaaatgtttggcctctgtacagaatgatgtgaaaaagaatcttctagcatggggaggtggaggggagggatgtctagattacttctacggcccccactccctaagattcttttgaaatcagttaagacacgcataaa

SEQ ID NO: 1150 - DNA, 2001 bp, Homo sapiens
gatgagaaagagtagatgccattggtgtctaagagagtaaaaaaatgacttctcattccctgttgagaaatggactctggcatcaggttgatggagaacaaaatgtcagctttattccagtaaaaccatattagagaatgtggcctgatctgtggctacaatcaggccttttatacccttccctagttaaacacactctcagagtcaggtaaggccctggacaactgttgtttgcaggaggagggcagttcctgtgtgaaggagaaggagaaagtgtgcatcctgaagccaggggtgcacctgacttctcgactgtgaatgagagaggaggaaacctagttcatatctgcacaaaaattctttttggtatccttgaagtgggctgaaacaaaaaagatcaaaatgttactctagcaggaggccactcatggaaaccttaggcaggggaattgtgttacccctggtacttaccaactttaacttcagtggggcaaccaagccaatggagcactcttatctctgaaatgtttggcctctgtacagaatgatgtgaaaaagaatcttctagcatggggaggtggaggggagggatgtctagattacttctacggcccccactccctaagattcttttgaaatcagttaagacacgcataaataaaaaaactccaagtaaagcatgtcagtattttaaaggcttatttgtttgagcaatgagagatgatcagtgttctaagtgctatggttcatcatgttctggaggtggctttgttccaactgtttgttcacgagtgttttgagttaaagggaattacagtctacaaatttatgcacatggcacttcacagaatagaagaggccaacttctggccttttatacccacatgcaacaaatacagctcgtgtccttcccccaggactcaatttgtaagcctctttattgcattgtgctgtagtaaaaaattctcagttttgtgggcaacctgtgaaaccagccttcctttatttcaactttgttgttttgcctttatactgtgaattaaatgaatccttgggggttctaattatattatggaaaaaagaacttgatattctgagaagctgaagaacaatttgttttcctcagctaggtatttaggacttttaggatttagttaccattttcaaaaaacttgaagaagattaattatctccattgcctcaaatgacaaagatagtatgttcaattctctcctgagttatcatcataataaccctatattcttaatatggccttttatattttacaaagtttctcaatagggaatgagaagaaagtgattttttaatctcttagacaccaatggcgtctactctcccttatcatataactatcttaatatttgaaggttgttttcatcttcctcttcagtttttctcttttctcttttaccacaataatcatcacaaataatcctgtttggaaggtggagaagaggaagcaagacagatattattgtacccatttcagaaataaggagaatggaactcagagagtggtggtgggaacaattaacaaatgttttctgagcaccaatctgttccaactacctgcagtagtgcatttaatccttataatagttccgggagttaggtgctattatccccattttgagatgaggaaactgtggctcaaagtgttagttgcccaaggtcatgcagtattaagtagaagaaccaaaattagacccaggctttctggttctgaaatccatactcttaagcactaggttgttaccactggagaggttatgaacgtgcccaaaggcactggctgcctagtagctgaggcagggccagaacctgtctttagactgcttagcacatcttctagatcctgtagctgcttcactggttttcattaactttggggtttttcaatacaaaaagaggaaacaaatgaaagctgagccgaattttgcttttgtaacatagaggaacttactcagtaccaaggataat

SEQ ID NO: 1151 - DNA, 20 bp, Homo sapiens
aaatgaaagctgagccgaat

SEQ ID NO: 1152 - DNA, 23 bp, Homo sapiens
agttcagaaacatattgccctta

SEQ ID NO: 1153 - DNA, 245 bp, Homo sapiens
aaatgaaagctgagccgaattttgcttttgtaacatagaggaacttactcagtaccaaggataatctgaggctcttatgggatttttttaagtgcccagtgttgtttcatattctgtttattcttcaccaccaccaccagtaaatgcaggtggttcttgtctcatagtgattcacatgtgggtttatgccaggtacacctattttactacttttggcatttataagggcaatatgtttctgaact

SEQ ID NO: 1154 - DNA, 19 bp, Homo sapiens
cagaggcaatgaagccaaa

SEQ ID NO: 1155 - DNA, 21 bp, Homo sapiens
tcaatgctaatgccacatcaa

SEQ ID NO: 1156 - DNA, 381 bp, Homo sapiens
cagaggcaatgaagccaaaaacaattttaagacctgttctgttctgacttgtaaagattatttgatgttaaccccatacccttatcccctttccaagtgagtaccaggggttaggaaaaagatataatattgcctggctcatttctaatcaaactttaatgctggcttcagcaaggccagatgcctactttttgtaaatatcattggcagttggcagtacatttcattaacagtttttatggctatcagtagtatttttgatactctgaggatgagcactagagaaatatgtgcttgctgaaaagcctgctaatctctgtgtgataacttaattttgctattacctgaatgtaagtgctattgatgtggcattagcattga

SEQ ID NO: 1157 - DNA, 20 bp, Homo sapiens
cattctgccaaacccttctc

SEQ ID NO: 1158 - DNA, 20 bp, Homo sapiens
ggccaagattctcatcaagg

SEQ ID NO: 1159 - DNA, 136 bp, Homo sapiens
cattctgccaaacccttctcagacattcaaccattttctttctcccttgttaacaaattttttaaaatattttttaaaaggaaagaaaagaatcctaccttatgaaattatcttggccttgatgagaatcttggcc

SEQ ID NO: 1160 - DNA, 2001 bp, Homo sapiens
gacagtcctaccagcactgcccataataaaggtcaggggtggttacccaaagccaagcacttttggtgttcctaccaaaaaaaggacattcaaaggcaacagatgtctactacaaaatctgttctatgggatctacagtgagggaatagattcagccttacagctaaagaaacggattgctatgcagagatttctgcttcttaggagttgccaaaaagacccttatccggcttaggagttcttggctgtgattttagtgttcttttgtttcccaagtatttttaaaatgtaaatcagtaactagcaagaggcatctttggtcattgtagttgcttggagtagaataaatttaaaaaattctttgatgtgagaaaaattactatcatcattatcacacatggaaggtcaacattagggccagtcattggagttaaactgtcagaagaacatcccagttactttctcacttttgagttgtgtagactgacaggatttgagtctttgagggctttgactagggtaactgacctcaaaacaaatagctagagggatatttctgcttctatccgctgagggatttgtagcaagaagccatattgtggatggtatattttaataacaaaggggattttaaaaggaggatgacacattgatttggaatgttttctcaactgtatttacttattcttaaatattttccttcatgctttctttctcaagtggatgaccagctggttgccacctttttcttctctctttgcctctgttcctaatttctttcttatccttaaccactccactttccttcctccaatcttgttttctctctaaatctttcctccaaccttattgaatctctccccttctttttgttatctggtcatttgatctataatttcgattccttttcctgaaattccctcctttttccttttcccctaaaccatcattctagtcctccccacacccaagcttcttatctctttgctgttaatctccaatgtgtttattgacttgtgtgccaaaaggcaaaatccccagccccctcccaaccatgccagtgcattgaaaagcagcagctgtcattgctcaacaagttccttgtgatctacaaatcaatggataagaattctcacagtgaaagtttacatgtatatatttgtatgtatatatgagacatgtgaccatgtttaatgaatggagaaggacttggatcttttctagtagagaagagaagcagaacgctttgcctaaccctatttctttactaaggtaatgaaaaaattatacagggaaaataaatgatgttaatgagagaaacagggacaggagaccaataaacaatcatcaggcatgagaatatcttgctgaacttattattgatagtagacacaggaatgtaatataaatgcagtgatggaacagaaagcagactcaggaaagaaagagatgataataaatagtaataaaatccaagtgattcatatgctcaagtgaaagaaagaagaaagagggcagtgtacacaaagtaaaagggcaagaaaatggaagtagagtcatcactcgtagagataaaatagttgggaaatatgagaagccttcctgacatcagtaaaatattacatgttaaacagcaaacaaaagacaacaacagtgtctgtagtacttttggaatataaaagttagataatactagagtagtatcttcaaaataagcaacttcagaaatcaagtccccagtaaagggaattggaagaatttgaatagatgaaataaggagcagtggcaagtgatacaaaccttaagcaggaaaagtgattttaaatggtactggcaggttaacaactggcaaaaagaaaaaaaaagaaaagaaaagcaagatggtgctatatcccccaggtgctgggaaaccaacctggcctaaaaaaggagcagacccacctaactttttgccaagcactgtgctaggtgcattgcatacacttttaatttaagcctcgc

SEQ ID NO: 1161 - DNA, 20 bp, Homo sapiens
agcagctgtcattgctcaac

SEQ ID NO: 1162 - DNA, 20 bp, Homo sapiens
tggtctcctgtccctgtttc

SEQ ID NO: 1163 - DNA, 262 bp, Homo sapiens
agcagctgtcattgctcaacaagttccttgtgatctacaaatcaatggataagaattctcacagtgaaagtttacatgtatatatttgtatgtatatatgagacatgtgaccatgtttaatgaatggagaaggacttggatcttttctagtagagaagagaagcagaacgctttgcctaaccctatttctttactaaggtaatgaaaaaattatacagggaaaataaatgatgttaatgagagaaacagggacaggagacca

SEQ ID NO: 1164 - DNA, 20 bp, Homo sapiens
tgaatggagaaggacttgga

SEQ ID NO: 1165 - DNA, 20 bp, Homo sapiens
ttggtctcctgtccctgttt

SEQ ID NO: 1166 - DNA, 143 bp, Homo sapiens
tgaatggagaaggacttggatcttttctagtagagaagagaagcagaacgctttgcctaaccctatttctttactaaggtaatgaaaaaattatacagggaaaataaatgatgttaatgagagaaacagggacaggagaccaa

SEQ ID NO: 1167 - DNA, 20 bp, Homo sapiens
gcagtgatggaacagaaagc

SEQ ID NO: 1168 - DNA, 20 bp, Homo sapiens
tcacttgccactgctcctta

SEQ ID NO: 1169 - DNA, 383 bp, Homo sapiens
gcagtgatggaacagaaagcagactcaggaaagaaagagatgataataaatagtaataaaatccaagtgattcatatgctcaagtgaaagaaagaagaaagagggcagtgtacacaaagtaaaagggcaagaaaatggaagtagagtcatcactcgtagagataaaatagttgggaaatatgagaagccttcctgacatcagtaaaatattacatgttaaacagcaaacaaaagacaacaacagtgtctgtagtacttttggaatataaaagttagataatactagagtagtatcttcaaaataagcaacttcagaaatcaagtccccagtaaagggaattggaagaatttgaatagatgaaataaggagcagtggcaagtga

SEQ ID NO: 1170 - DNA, 20 bp, Homo sapiens
taaggagcagtggcaagtga

SEQ ID NO: 1171 - DNA, 19 bp, Homo sapiens
ttaggccaggttggtttcc

SEQ ID NO: 1172 - DNA, 151 bp, Homo sapiens
taaggagcagtggcaagtgatacaaaccttaagcaggaaaagtgattttaaatggtactggcaggttaacaactggcaaaaagaaaaaaaaagaaaagaaaagcaagatggtgctatatcccccaggtgctgggaaaccaacctggcctaa

SEQ ID NO: 1173 - DNA, 20 bp, Homo sapiens
ctgagccagttccaaagtca

SEQ ID NO: 1174 - DNA, 20 bp, Homo sapiens
gggagccatcctgtgagtaa

SEQ ID NO: 1175 - DNA, 247 bp, Homo sapiens
ctgagccagttccaaagtcataaggctcagggggaataactttgactttgtcaagtcagagtgaacagccagaggcagcagacataggatattgtcagaggtaaatcaccagcttggtctggtctgtcttattgcaaggtcagaggaccatagcaagccagccaaatgttttcaaccatggaaatcccctaactttccaactgctgcagtcccacagctctgagcttttactcacaggatggctccc

SEQ ID NO: 1176 - DNA, 20 bp, Homo sapiens
agattcctgcattccaccag

SEQ ID NO: 1177 - DNA, 20 bp, Homo sapiens
gagggaagtgaggagggagt

SEQ ID NO: 1178 - DNA, 391 bp, Homo sapiens
agattcctgcattccaccagggatcagaatatctgaggttggagtgtgaccttgggcaagatgtgttgctcttcttagcctgtttctggatctatatcagagaactggtcatgatgatatctctgtccttttcagctgtgatgttctgtagcattctgtgaaccactatcaggagacactagttctacagaaatcttgggaccttaacaacaacaacaaaatgacaaatatttatcaaatagtcacagcatataatgcgctatactggttaccaagttcacatagataactaagctgtggcccttgtccttgtagaaatacagcctcctggggcccagataagacaactgttatctgaggaaaacgcctccactccctcctcacttccctc

SEQ ID NO: 1179 - DNA, 20 bp, Homo sapiens
attcccgtagtcgtcccaac

SEQ ID NO: 1180 - DNA, 22 bp, Homo sapiens
tccaaacagctactggctaaca

SEQ ID NO: 1181 - DNA, 367 bp, Homo sapiens
attcccgtagtcgtcccaactcactcataggtaatgccagactcaaggacattagcccaaggaaatttgccttgatgtttttcttcctgaagaaatattggactgttttctatttcttcaagttatgctatcaaagaaagaaaaattatcttacgcttttgttgggtaagtagggaagaagctgagaaggaaaaggaaaggaactagcatatgctttgcctcatgtactaggctaggcactttacctacattatcttattaagctaaaataaaaccaaattcatgtgacaagtctgcaaagcaaagcaattctagtgagcttaccatctgtgcttgtttatcgtttgttagccagtagctgtttgga

SEQ ID NO: 1182 - DNA, 2001 bp, Homo sapiens
tttcatttctgctggtatttcatcattatgggtgcatcccaatctaattatatgttgatttgtaatgaacagaggcttcctctcatttaattttctgttgactttatattccctctgtttggaaacctccaagattatggtatcagtttcaattttgttaaactgatgtcttttcgtgatgacctgcttccagtgtattacttttttattcagtgattctatcaaccagtgttatctgttaaaaaaacaaacaaaaacaaccactgatatgctggtgggctctatgctgtcatctaaaatgttgtagaaagatctgtttgtattgttattgttgctgtgaattagtccaatggcctacctactatataagatatatttgaccttaggagtgaaaaaaaaaatcttaacgggaatcctcactgaagtctgatttgggtacaataagaattcatcaaaaacatagaagctgcatttcctaggaaatcgaggctttttcctgtatttgggagtggtaaagaatacgcccaagaacttggaacagataaagcattggcagacaaacaaaagatctgtagggcaggacttcctttttattctcctgagctctctttcccattgtttcagagaagatggagcaaacacccagacagaagctgcttcagtattgtcttctattgataggctgcttgtgttcagtgattcctctggcccatagtgtctgctggacagttggaggctttttgaagccattgtattgttagagaataattagagtgaatgaaacagtgggtaggggttaacaacaattctttgttgcaagcaattggtagtcttggcatcagtattggtaacaaggccaatctactggaaggaatcgaaacaaaagatggaaaagttgtggttggtttgtctgatccatccagcaaatccacccatgcatggccattgtgtcctgtgagctctctggaaatgcctttggtcacactgcattccaagccacggggtgggtaatctctgggtagtcttgtacatggatttcctagactttcccataacaaaaatggcaaggcacaggtgttgtcttggcaattaatcatacactttataaagaaaacaatgtcctaacatttgggtagatgaatggcgtggtagaaaagccccatgatgtttcttttggaaggagggttaaagaatgccgtaacactaactagctcagatgtgtctattgataccaaggtgaaaacatctaggcaaaaccataatctatgtcctcattgtctcctccatctcctccagacctaccctgtcctcgtcctaggagtttatattgtgatctagaggaggcccagccagggtggggtctaacaaattggggtgggtataaatttagtacttcaaagatagtggctcttattggaaaactttataagctgaatgcctatctccccctcactaatttggggaactgcagctgctgctaaattctgagtcaaatagacttgcaactatggttgatcagatttgtgatgtattagtaacacatggaagtggtgccttatgtcggggccctgggttcctactggaaacccatcacttagatttgtatgatattggtatgatctgctagtgtgtgatgctttgttacatcctcttttcaagtcagctttccaccagagcttcccaagaacagagaggcctgcctcaaatatttggttcaaattatgcaacataagttaccttatatctcttttcctgttgcttatctaaaaggacagagactcagaggcagtttaaaagtggaggtgggcatatctccaaggcgatttatgactttagacgcatatccctaaaaggcgaattcctgctctcacaagttgaatagggctctaatcccacaatctgatttaggccaagaatgacttacatttgaaatcccaaaccaagactgttcaagattggtattaaagtcggagcaatgaggtggaggtagtgttcacctcc

SEQ ID NO: 1183 - DNA, 19 bp, Homo sapiens
aggctctgcccacaagaag

SEQ ID NO: 1184 - DNA, 22 bp, Homo sapiens
aatgtgcaagtatgtcatgcaa

SEQ ID NO: 1185 - DNA, 230 bp, Homo sapiens
aggctctgcccacaagaaggaaagttcagttcagattccctgtaattttaagaactttcatgaatatactaattttagtagaaacaactaaccaagatggcttatcattctcaacggaacataattttaaggagaaacacttggaataatctaattttaaactgtaatgctaattctttattagtctatttgggggattttttatatgttgcatgacatacttgcacatt

SEQ ID NO: 1186 - DNA, 20 bp, Homo sapiens
gggctgcggaaatacttctt

SEQ ID NO: 1187 - DNA, 25 bp, Homo sapiens
tttacaggagtttcttaatgtaggg

SEQ ID NO: 1188 - DNA, 123 bp, Homo sapiens
gggctgcggaaatacttctttggatttttgctgaaaaagaaaagaatagcattaaaacaaaacaatacttaccaactagtaataatactctaagtataccctacattaagaaactcctgtaaa

SEQ ID NO: 1189 - DNA, 2001 bp, Homo sapiens
gtctttcatgttgtgaagagtatgaacttgggctgcggaaatacttctttggatttttgctgaaaaagaaaagaatagcattaaaacaaaacaatacttaccaactagtaataatactctaagtataccctacattaagaaactcctgtaaaaccaagtctgaatgtataaaatcgatcaaacaaaaaggttgtattttaattacaaaagcgttctttgtaactggaaccacaatcggatttcattaaatagtgagcttctgatgtgaattgtaaatgttttaatctacaaaaaaaagtacttaaatcttgacttttcaggaacccacttgttatataaaacaaaaaccaactggactatagttttacacacatacttacatcacaccctcaccactttccgactgggaatcctagagtattttttagtgtttagctggaggtccaggtagtgtcctaattttgcacacacagccctggtgacatgaaagggcattgttgaaatgaccaagtgagtcatggtaatcagggcaatcctgtaggttagagatatgggggtcttgtttatttgtttgcctgctagagctgcaattctttcataaactacatgacttttgaaaatacctcaaacaacatatataaatcagaccaaggatattaatctcaggccaccgccatagtgaggctttgaagccaggggaaggtggtgagaccttcttgtttgttaaggaagaaatgtcataaaaattccaaagcaggactcaaatttccaggggagagggcctctttattgtttcctctaatagctgctttggcgctttagtgaataaatgtgttgcacaaagtaaccctagatgcatctgaactttagtctggcttggctcccacttttgtatttagcatccattctgaattatttatttaagatatttttgctgttgtttgtcactccttcttcctgtctccctaccagtccccctcattcgtcctgtctttattttcacacttctctaattaattgatatcttctgctcttagcactgcagcaaatgtgcctgcatttttatgtggatcttcactatgcaggctatgcttttaagtttctggaatagaatgatggtaaaaatgagtcatggcttgtttctatatttgtttctgagtcaagaagcttaattttcttactataatgcctgagatatcaagctatacagtttacttttaagggaaacaatcacaatttcatcaattcctttaagtagatgttttcaaatattatagaattctttggatttgtgtttccaaaatgaacaacacaatggtagtgctattattgttttaaggagaaaaagaagcatatccaaaataggtaaaatcttcccctaaatcccctgggaacaggcctatgggtgttgccctggcctgctcacagccccaggacaaccggcattaattcactgagggcctcatacctacatctcaatgactgcttaaaccagatacctgagggtctggggtctaacagaagaaaaaaggagagtagagctgagggttatggaacattcccaggaagggagagaatatcagaaaatgcaagactgccccagtgcagcagcagtgatgcagccagaggttaccagaagttctggcacctccaccttcatggacacaagctgtatatatcagtttaccatggttttcagtgtaaaaaagcaacttatgtccttcagtgtcagtttattgagctcttcagtgcagcctcataacttatattaattgggaggaaaatgcttccagagaaaggagagatgctggacaaaacaactttgtctttgactagttgtcaaggccctgctgtttggagtcattgacaagtccttgattcttgtatgacagatccaggggaaaaaaagaagtgattcatcttcttctgttgcacctttcaaggaggaattaaaaaaaaaaaagattttgcttatggacttaacatcactggcagcagtaa

SEQ ID NO: 1190 - DNA, 20 bp, Homo sapiens
gcataccattgggccttgta

SEQ ID NO: 1191 - DNA, 22 bp, Homo sapiens
ttgaaacacaaactccgtaaga

SEQ ID NO: 1192 - DNA, 360 bp, Homo sapiens
gcataccattgggccttgtaaattacccactgggtactgagtaatcaagaggcaatttaggaggagctggaaaatagtccaatatattcctctctagtgctttgattctttcacttctggaataattctctttatagtcctaaagagaactgtgtattctctttttctccatctcctttgcctttcatcctccccttttcctctttttcacttagtattttctttctttcacatgctcccttttttttctttctttctcattctcttcttccttgactttgctctttttcccttttcttcctcttccttttcctctctccccactaaaaacattaatatcttacggagtttgtgtttcaa

SEQ ID NO: 1193 - DNA, 21 bp, Homo sapiens
aaagatgctgggttcatgact

SEQ ID NO: 1194 - DNA, 20 bp, Homo sapiens
catctgagctggcttgagtg

SEQ ID NO: 1195 - DNA, 267 bp, Homo sapiens
aaagatgctgggttcatgactaataaaatggggtgtgtgtgtgtgcgtatgtaaggtatcaaacaatgaacactaatgaacactgcaccttttccaacattgccactcaaggacttcccacagactgcctgttatttgggggcaggtcatgaccatccccatgagatagtttactagagagcattattcttcctctctcacacattggtattaacttagacttttgtggtcttaaggaataaacacccactcaagccagctcagatg

SEQ ID NO: 1196 - DNA, 20 bp, Homo sapiens
caaagcaagggaggatgatt

SEQ ID NO: 1197 - DNA, 20 bp, Homo sapiens
ggcagattaccactggcttt

SEQ ID NO: 1198 - DNA, 425 bp, Homo sapiens
caaagcaagggaggatgatttaaaagctctcattgttcaattcccacctgtgagtgaggacacaggaaggggaacatcacacaccggggactgttgtggggtagggggaggggggagggatagcattaggagatatacctaatgctaaatgaggagttaatgggtgcagcataccaacatggcacatgtatacatatgtaacaaacctgcacgttgtgcacatgtaccctaaaacttaaagtataataataataaaataaaaataaataaacataaaaaaataaaagctcagagcacaaatagagtactcagaagtttttgctaggttatcatgtgtaatttaacaagatggcatttatcttttttttaagagactgaagaagaattagacaaggttagctgtgtaaagccagtggtaatctgcc

SEQ ID NO: 1199 - DNA, 21 bp, Homo sapiens
tgcattgttccatgtgaatgt

SEQ ID NO: 1200 - DNA, 20 bp, Homo sapiens
catgccttctcctctttcca

SEQ ID NO: 1201 - DNA, 114 bp, Homo sapiens
tgcattgttccatgtgaatgttgcagcatgtgtgtgtgtgcacacacgtgtatttgtgatgttgtagacagagtaggaggaaagagtagcagtgtggaaagaggagaaggcatg

SEQ ID NO: 1202 - DNA, 23 bp, Homo sapiens
gctagactcttgagatggctctg

SEQ ID NO: 1203 - DNA, 22 bp, Homo sapiens
tcctgaataaacacgatcctca

SEQ ID NO: 1204 - DNA, 142 bp, Homo sapiens
gctagactcttgagatggctctgtaaacataccctctaatctatggtccttccttcctacttcctcagaattcactgaaaacaatagagctctaggaactcctattgcttaaaacaggggtgaggatcgtgtttattcagga

SEQ ID NO: 1205 - DNA, 20 bp, Homo sapiens
gccagtgagagatgctttgg

SEQ ID NO: 1206 - DNA, 20 bp, Homo sapiens
aaggcagacgagaaacggta

SEQ ID NO: 1207 - DNA, 360 bp, Homo sapiens
gccagtgagagatgctttggagttatctgggacctcatttattctggtggaatgccagaagtacaggaggcatctcctagggtatttagttttttagaggctaggaaaggtagtaaaggtaaagtagatacaaatttgttactatgacttttatggagccttgagatagttatacgaagtaggaggttgagcagggattattttaatcggagaagagattagtagaaactcatttaggaggattagagcatgctgaatgagatgtcagaagcttttaggatccaagaaaagtggatggcagagagagagaggggtcagcactgtgtttaatttccttctttaccgtttctcgtctgcctt

SEQ ID NO: 1208 - DNA, 20 bp, Homo sapiens
agcagcaggaagagaattgc

SEQ ID NO: 1209 - DNA, 20 bp, Homo sapiens
tgacgtgctggtgatcagtt

SEQ ID NO: 1210 - DNA, 259 bp, Homo sapiens
agcagcaggaagagaattgcatttcctgctggctagagaagccaggtcaattttgtcctaccattctgggaactatcacttcagacacctaacatatccaggtcctgcttatttttcttgaatgagctattaaaatgcatgtatgtgtgcacatacacacatacatacacatcatgcagccatttgcctctgtgtatacatacatatcattgtgtagattgcactttttcagaaaagacaactgatcaccagcacgtca

SEQ ID NO: 1211 - DNA, 19 bp, Homo sapiens
ggtggttgctgctaaggtt

SEQ ID NO: 1212 - DNA, 21 bp, Homo sapiens
tgcagaatgaaaggacagaat

SEQ ID NO: 1213 - DNA, 310 bp, Homo sapiens
ggtggttgctgctaaggtttgattagattagggtttagagggttttgttttgttttttctttttaggcaaaaacactctataggtggtgctagtacttcctattttatcatgtcacaaggcaataatgtctgactatatcacctttaatggtgattaagttgatcagtggttcgggatagtggcagcctgatcttcttcccatgaccaagatttctgtcaacttttcacctactggttttagcacccattgatgatcattgcctagatccattgtttaatgagacatatattctgtcctttcattctgca

SEQ ID NO: 1214 - DNA, 20 bp, Homo sapiens
tggttgctgctaaggtttga

SEQ ID NO: 1215 - DNA, 21 bp, Homo sapiens
ctgcagaatgaaaggacagaa

SEQ ID NO: 1216 - DNA, 309 bp, Homo sapiens
tggttgctgctaaggtttgattagattagggtttagagggttttgttttgttttttctttttaggcaaaaacactctataggtggtgctagtacttcctattttatcatgtcacaaggcaataatgtctgactatatcacctttaatggtgattaagttgatcagtggttcgggatagtggcagcctgatcttcttcccatgaccaagatttctgtcaacttttcacctactggttttagcacccattgatgatcattgcctagatccattgtttaatgagacatatattctgtcctttcattctgcag

SEQ ID NO: 1217 - DNA, 20 bp, Homo sapiens
ggatacgcatggatgacaca

SEQ ID NO: 1218 - DNA, 22 bp, Homo sapiens
catgtcagctgagaattcaagg

SEQ ID NO: 1219 - DNA, 290 bp, Homo sapiens
ggatacgcatggatgacacacagtcacacagtcatttgaggactttttggttgctgttttgttttagtttttacccccttagagaagtctttcataaaaatttttcctaaaccctgttgcatgcaaattagggcttttcctttcctctgtaatggggcctgatattctttgatgtgttgtagcagaatttagcttctaaatacagtttgaaactagctctccacacacacacacacacacacacacacacacacacacacacacacacccttgaattctcagctgacatg

SEQ ID NO: 1220 - DNA, 20 bp, Homo sapiens
tgcatgcaaattagggcttt

SEQ ID NO: 1221 - DNA, 21 bp, Homo sapiens
tcctcctaccactgaacttgg

SEQ ID NO: 1222 - DNA, 241 bp, Homo sapiens
tgcatgcaaattagggcttttcctttcctctgtaatggggcctgatattctttgatgtgttgtagcagaatttagcttctaaatacagtttgaaactagctctccacacacacacacacacacacacacacacacacacacacacacacacccttgaattctcagctgacatgttatttctatttttttgtccttactgcaagaacctgtcctgtaggaaccaagttcagtggtaggagga

SEQ ID NO: 1223 - DNA, 20 bp, Homo sapiens
tgcatgcaaattagggcttt

SEQ ID NO: 1224 - DNA, 21 bp, Homo sapiens
tcctcctaccactgaacttgg

SEQ ID NO: 1225 - DNA, 241 bp, Homo sapiens; identical to SEQ ID NO: 1222

SEQ ID NO: 1226 - DNA, 20 bp, Homo sapiens
ggcactgaacatggtgtttg

SEQ ID NO: 1227 - DNA, 20 bp, Homo sapiens
tgctggtttcttgtgggttt

SEQ ID NO: 1228 - DNA, 360 bp, Homo sapiens
ggcactgaacatggtgtttgatactcactgggtacccagtaaatgttagttttctttgtctagactatgtagtgctcttcagttttcaccctgatcaaattgcatttgttaaaaattccaagtaagacatggcactgggtactttaaataaaggggtgctaagggaaggtcagcatgcggtagagggctgaaagagccagttacatttgtttgtttgtttgttttgttttgtaataaacaacagtggcttctcatctcctttccctggtcctgagcctgctgagtcactgttccagcccttgggccacatgatctcaggctgtgtctatggaatacagcaaaacccacaagaaaccagca

SEQ ID NO: 1229 - DNA, 22 bp, Homo sapiens
ggtatttgctgccttaagctac

SEQ ID NO: 1230 - DNA, 20 bp, Homo sapiens
cagaaggctgggaaatcaat

SEQ ID NO: 1231 - DNA, 152 bp, Homo sapiens
ggtatttgctgccttaagctactttttaaatacttagtggaaataagtcatctattttcattagtgtgtgtgttgtgtgtgtgttggttggattttcctggccaggagcctctgccttctgaccaaaatgacattgatttcccagccttctg

SEQ ID NO: 1232 - DNA, 20 bp, Homo sapiens
ttccttgtgggaaggcatta

SEQ ID NO: 1233 - DNA, 20 bp, Homo sapiens
cccaacaccaccaattacaa

SEQ ID NO: 1234 - DNA, 363 bp, Homo sapiens
ttccttgtgggaaggcattaaaaatgggactcaaggtctatgtgacactatatgaggtgccatttcctatacaggtgcacctctgtaagcagcatacagttaagagggcaatgcaaagaagctttgggagtaagcattctctcatatataaagttgagttgagacagaagttactttatacaaatatagggtttcttgttccttctaataggtggatggtattcttcttcctcgagagaagctgattaagttggattctgtctattcctggcttcagacctaatcatgaccattaaaaatatctatcttttcctttgtccaagaatcccactctggtcttgcattgtaattggtggtgttggg

SEQ ID NO: 1235 - DNA, 20 bp, Homo sapiens
acaagcaaagaagccacagg

SEQ ID NO: 1236 - DNA, 22 bp, Homo sapiens
aaattgcaaccacaacctaaga

SEQ ID NO: 1237 - DNA, 421 bp, Homo sapiens
acaagcaaagaagccacaggcatccaaattttattttatttatttatttttatttatttatttatttatttatttgagacagagtttctctcttgttgcccaggctggagtgcaatggcacgatctaagctcactgcaacctcggcctgccgggttcaagcaattctcctgtctcagcctcctgagtagctaggactacaggcgcctgctactatgcccggctaatttttggtatttttagtagagacagggtttctccacattggcaaggctggtctcaaactcctgacctcaggcgattcgcccgcctcagcctcccaaagtgctgggattacaggcatgagccactgtgcctgtccccaaattttaaattattaattgtattcaacaccagtaatatcttaggttgtggttgcaattt

SEQ ID NO: 1238 - DNA, 20 bp, Homo sapiens
gtctggccttgttctgctct

SEQ ID NO: 1239 - DNA, 20 bp, Homo sapiens
cagtctacgcaaagggagga

SEQ ID NO: 1240 - DNA, 266 bp, Homo sapiens
gtctggccttgttctgctctgttgctctcctactcagaaatcttagaatagttttttttgtttgtttcttttttgttgtttgttttgtttttgtttttgttttttctgagaatgagctaaaatcagtaagctgattttaacatatttagggatttgggatttgttagcttgaaatcagccatggtgaaagtatttataccatggaaatcagcaaatgctgaaaatcaggtggcttgtttttttatttcctccctttgcgtagactg

SEQ ID NO: 1241 - DNA, 20 bp, Homo sapiens
gccgctctatctgctcaact

SEQ ID NO: 1242 - DNA, 20 bp, Homo sapiens
accaggaaggcaacacaaat

SEQ ID NO: 1243 - DNA, 394 bp, Homo sapiens
gccgctctatctgctcaactgtataaagaaaaagtctagaaaattaatttaacttttcatgtttttctgcctaaattggcagattttaaagacacgaccatgtcatattctttttgtatccatgttgttatccagtgactagcaaagttctagacacatactaggcagtaaataaatgctgaatgaatatcacagtaaatacttcagaagaacagtgaccatgagaatcatataaagcacctatgaacattgttaaaaattgttataattattacacacacacatacacacatatacacacacacttaattcagctctgaggagaccagaatagagtaaactgcttccttatttgaaaatcagtaagtacttttatttgtgttgccttcctggt

SEQ ID NO: 1244 - DNA, 2001 bp, Homo sapiens
tttctgagaatgagctaaaatcagtaagctgattttaacatatttagggatttgggatttgttagcttgaaatcagccatggtgaaagtatttataccatggaaatcagcaaatgctgaaaatcaggtggcttgtttttttatttcctccctttgcgtagactggttttcaaaacaccactagataaagtgaatgatttcaacccttcataatctgtcatttcctttctattcaaatttagttcctgccgatatcttaggtgaagctcctatgccaagtgtgccactcttggcctgcccctccccactcccagctccaggcctgtgcagagacagctcacctagaacagtgcttccccctttcacttcttctgcttctcgtcccacatccactccttcgaggcttatttaaagactgcctctttcacagaacctgcttgcctatggtctcagtctctttttcctctgtggccgctctatctgctcaactgtataaagaaaaagtctagaaaattaatttaacttttcatgtttttctgcctaaattggcagattttaaagacacgaccatgtcatattctttttgtatccatgttgttatccagtgactagcaaagttctagacacatactaggcagtaaataaatgctgaatgaatatcacagtaaatacttcagaagaacagtgaccatgagaatcatataaagcacctatgaacattgttaaaaattgttataattattacacacacacatacacacatatacacacacacttaattcagctctgaggagaccagaatagagtaaactgcttccttatttgaaaatcagtaagtacttttatttgtgttgccttcctggtttatcttaagcaaagaagaagagcaaaacacatagaaaagaaattgcttcagggttgcagtataactgccacaagaaacccctgacttgtgttcatagcaaaggaagagttaccaggttatcctcccagaaatccaacaaagaatggaaataattgatttttctagattttttttttgtatagctgagcagataaagaggctatataaatatattcctatagtctataatgaaggtttttattagtggattaaaatgaacaatgtcttagaacatttatagccattcaaatatattacaatggatgttaagttcctgtgatttacacacacacagacatgcacacgcatgtataaattgctctgttttgcttcaagcattcattgtatcagctttgccattgtgttattaactgtggtgttaggcaggcccttttgatgactttgggtctcagtttcttctgttacatgacaggttggaagaatacaagattgctaaagtgttttccagctctagcatataagatcatgaggtaggtctgaaggtcaggagcattcacccactgatggggttttaattctgacttacagagtaggaagaatggccgtgttgctgatgttgccctagattaaacacaataaaaaggatctttaataaatcttagcactgatacttcggcatacctgcaggagcctttcctccctgtatgttttctctttgtcactctggggacacttctggtcttgtctgtctgtctcttgctctctctgcctctctccacacaaaggtgtacaaaatcagaagtgtgtgcaaaccagtgagaatgagaaacacactgggatggggtgactggtcaatttgcataagttccaaaagttccattctcccaatagtttgtgaatgggatagtttgtgaaaggcaggctgcaaattgacaagcacactgcaaatatgaggagatattttaagtaaatagagaaaattcagtttgccctctcattccttctcaaggcacaaagctcaggggcaggagcaatgccgggaaagtccttggcccttggggtgtacttctcccttctttggctctcccacctgggagctggataactcaacagtggaatgaaacctcaatgaaggga

SEQ ID NO: 1245 - DNA, 20 bp, Homo sapiens
atttgtgttgccttcctggt

SEQ ID NO: 1246 - DNA, 21 bp, Homo sapiens
gcaatttatacatgcgtgtgc

SEQ ID NO: 1247 - DNA, 121 bp, Homo sapiens
  misc_feature 61: n = A,T,C or G
gttatcctcccagaaatccaacaaagaatggaaataattgatttttctagatttttttttnggatagctgagcagataaagaggctatataaatatattcctatagtctataatgaaggtt

SEQ ID NO: 1248 - DNA, 20 bp, Homo sapiens
aggtctgaaggtcaggagca

SEQ ID NO: 1249 - DNA, 20 bp, Homo sapiens
tggagagaggcagagagagc

SEQ ID NO: 1250 - DNA, 246 bp, Homo sapiens
aggtctgaaggtcaggagcattcacccactgatggggttttaattctgacttacagagtaggaagaatggccgtgttgctgatgttgccctagattaaacacaataaaaaggatctttaataaatcttagcactgatacttcggcatacctgcaggagcctttcctccctgtatgttttctctttgtcactctggggacacttctggtcttgtctgtctgtctcttgctctctctgcctctctcca

SEQ ID NO: 1251 - DNA, 20 bp, Homo sapiens
tgatcttcaggccctcctta

SEQ ID NO: 1252 - DNA, 20 bp, Homo sapiens
atggcatcttaggccatttg

SEQ ID NO: 1253 - DNA, 396 bp, Homo sapiens
tgatcttcaggccctccttatgatcttaactgttagagctggaaaagactgtagcaatcttctagtatccactctgtcattcaacagaagagatagggacagaaataaggattttttctacattgttctagactaggtactttgagtcacagtattttcttcttcagatttcatttcattgacagaagttcagacatataggttattatagagttccctgctcagttattgtgactgttgtgtggccaaggacacatttcttagcccttgccaattcttccttatggtcattggagatactaagaactgttggacctcagtcataggtaacatctctttcccccagagtgattaatagagaagggatctaacagtccaaatggcctaagatgccat

SEQ ID NO: 1254 - DNA, 23 bp, Homo sapiens
aggactgtgtagctctgttgacc

SEQ ID NO: 1255 - DNA, 20 bp, Homo sapiens
gcaatggagtgagaccctgt

SEQ ID NO: 1256 - DNA, 110 bp, Homo sapiens
aggactgtgtagctctgttgacccctttagtcattttcattctcagcatcttctccttcttccatttattatttatttatttatttagagacagggtctcactccattgc

SEQ ID NO: 1257 - DNA, 23 bp, Homo sapiens
tcattctcagcatcttctccttc

SEQ ID NO: 1258 - DNA, 20 bp, Homo sapiens
atattggcttgatggcatgg

SEQ ID NO: 1259 - DNA, 374 bp, Homo sapiens
tcattctcagcatcttctccttcttccatttattatttatttatttatttagagacagggtctcactccattgccctcactgtagccttggcctcccaggctccagtgatcctcccacctcagcctcccaagtagctggtactacaggcatgcaccaccatgcctggctaattttttcagttttgttttgtagagacagggtcttgctatcctgcccaggctggtctcaaactcctggcttcaagcaatcctcctgcctctacctcccaacatgctgggattacaggtgtaagccaccacgcccagcgctctcctttcaaataaaaattttgatagaagttacctatcactagtccatgccatcaagccaatat

SEQ ID NO: 1260 - DNA, 20 bp, Homo sapiens
ttctcggccagctgtttaat

SEQ ID NO: 1261 - DNA, 20 bp, Homo sapiens
agcacaagaaagccagttcc

SEQ ID NO: 1262 - DNA, 130 bp, Homo sapiens
ttctcggccagctgtttaatgagcaccaaatgaagtaaaatgctgcttggttcctctcctctcttcagacacaaacaatcgagcacatcctagtggaagggccgtgttggggaactggctttcttgtgct

SEQ ID NO: 1263 - DNA, 20 bp, Homo sapiens
cccaagctgaacagctctct

SEQ ID NO: 1264 - DNA, 21 bp, Homo sapiens
ttaggccagaggatcaaggtt

SEQ ID NO: 1265 - DNA, 121 bp, Homo sapiens
  misc_feature 61: n = A,T,C or G
acagctctctcagaggaagtcatctgaaattggtatgtgtgacccagtatatcttttgacnaatttgcattggaaaccacagtgagcatggaagaaatataaccttgatcctctggcctaa

SEQ ID NO: 1266 - DNA, 2001 bp, Homo sapiens
agccagcagaccacctccatcattgagttagacccacttacaaggtggcaggctattaaccagtcccctgttccactgagaacttgccaggctggccatcatagcatggtataggttgaagtagcttagtacctgtggtggatgactgtttttctcggccagctgtttaatgagcaccaaatgaagtaaaatgctgcttggttcctctcctctcttcagacacaaacaatcgagcacatcctagtggaagggccgtgttggggaactggctttcttgtgctgatcatcttggttcccacatccgtccctcccctctgggctagagtttggaggagctattgaagaaccttgagaaaactgttaaccttgaaagtttagttattcatcatcaaatatattaacaaacgtttgtagccaaagctttactgtctatggcagttttaaataattatcaaaatcatgatttaattaatttctctctccattttgggttggcttagaggagtaggagattgcaattcacaagtactttctggtcctgtaaccaacttgcactttcaagttcaggtaatcaccttgtccttttcagtttatttacccatgacttaggttaaagttgcccatgcctctggtgaaattcacaaatgaaacttcacctagctgggtttcatatttgtaagaaatcattttttttctccatgagaatgtgcaggtcagctgagacaagcatgattaattctagacatgaattagaacaagcccaagctgaacagctctctcagaggaagtcatctgaaattggtatgtgtgacccagtatatcttttgaccaatttgcattggaaaccacagtgagcatggaagaaatataaccttgatcctctggcctaataaacattcttgcaattctaaatgtacctagagtttgtgacaagtgtgtattggaaaactcgttgaaaacacatgagttagtaatgttctctttcagaagatgaacttgcatggccgaagtgagattccagtgggaaagacctggtagagaaagagtgggagaatgcgttgacctctggagggcagattatggcatgccaggcaatgggttgtgccatcagggaaggaatctagaaagacgaggagactcaggagaaaggagatgacttctgttgacaggtcattgttgctcagacttagtgcagatgagaaaggaaatccagaaacctacatgacagctcctcttggattggatgaaaatattgattttttttttttttccctatctggaatttgacagggtcagttcatgtctgggttttcagcacttaatacagggcgcttttgtcttgggaggcggctggactggtttttcctccaggcaggtgcacagagggcgtttattgtagcctgaaacacaaacaccaagcccctaggccctgatccacacactctccagtgtggctcaaggaaataaagtgaacaatgtctcttgcaacaggcgagcactgtaaatgccactcctgaatgatatatttcttaaaactttgtatccgtaacctgatcatctcttaaaacttaattatatgtcagagaaaaggaagctattggctcctccagctgtccaggttgaacgagagcacacaatggagcatatccgattcacagccttacttaggtaatcagattaatatctcctgaattgaatttacccttttgatatggagtctttcagctgccttgtttcacatctcaaattctgacaaagctgtgcggcctttgagtaatttccctgaaatctatatgtgggaagcctgtacttcaagcagtttttgggacttgcaccaattaaatctgtctctggcacacttttaatggcatgctttcccctgagtcaacaactgctccaaaatctgaagtcatttgtttaatttaaaagcaaaggttatggaacaaccatttcaagcttcaccagccaaactccagtggctttgaaaagggagatgaggca

SEQ ID NO: 1267 - DNA, 20 bp, Homo sapiens
gggcatggagttctcattct

SEQ ID NO: 1268 - DNA, 20 bp, Homo sapiens
gcagacatccagcctctacc

SEQ ID NO: 1269 - DNA, 168 bp, Homo sapiens
gggcatggagttctcattctgcatttaggaacttccataatattttaataataacaataatgataataatgccaatcactttaattaaatctccctaaataagcatcttttaatgcagtgttgtttgctgtaaaacatcccaactaatggtagaggctggatgtctgc

SEQ ID NO: 1270 - DNA, 19 bp, Homo sapiens
cttgatgcagggtgtgagg

SEQ ID NO: 1271 - DNA, 20 bp, Homo sapiens
ggtgatggatggaagaccac

SEQ ID NO: 1272 - DNA, 414 bp, Homo sapiens
cttgatgcagggtgtgagggggaagggggcagtctttttaaaaagcaggtcacggctggacgtggtggctcacgcctgtaatcccagcactttgggaggccgaggtgggcagatcactttaggtcaggagttcaagaccagcctgaccaacatggtgaaacccgtctctattaaaaatacaaaaattagctgggtgtggtggtgcacatctgtaatcccggctactcgggaggctgaggcaggagaatcacttgaacctgggaggcagaggtttcagtaagcagagatcacgccactgcactctagcctgggccacagagcaagactccatctcaaaaaattaattaattaattaaaaattaagaagcagattacctttgaacctgtttagatagtggtcttccatccatcacc

SEQ ID NO: 1273 - DNA, 20 bp, Homo sapiens
gattgtcggtgccatgtcta

SEQ ID NO: 1274 - DNA, 20 bp, Homo sapiens
cctgcttctcaaatggccta

SEQ ID NO: 1275 - DNA, 175 bp, Homo sapiens
gattgtcggtgccatgtctacgttgttaactgcagtccaacatgtaatctagttaaaaaaagaaagaaaagaaaaacccataaaataaattttaatagactacccctaggcaactttgaagaggaaatcattgcaagaaaatgagacttactaaataggccatttgagaagcagg

SEQ ID NO: 1276 - DNA, 21 bp, Homo sapiens
tgtcatttgtgaggaggacaa

SEQ ID NO: 1277 - DNA, 20 bp, Homo sapiens
tcaatgggtctgtttgctga

SEQ ID NO: 1278 - DNA, 408 bp, Homo sapiens
tgtcatttgtgaggaggacaagatttaaagagaaggtaactgggccaggtgtggtggcttaagcctgtaatcccagcactttgggaggccgaggcgggtggatcactaggtcagaagttcaagaccagcctggccaacatggtgaaaccctgtctctactaaaaatacaaaaattagctgggcatggtggcatgtgcctgtaatcccagctactcgggaggctgaggcaggagaattgcttgaactgggacctgggaggtggaggttgcagtgagccaagatcgtgccactgcactccagcctgggctgcagagcaagactccctctcaaaaataaataaataaataaatagaaggtaactggatattggccccaaacatattctaattcagcaaacagacccattga

SEQ ID NO: 1279 - DNA, 20 bp, Homo sapiens
acaaaggcccaagtccgtat

SEQ ID NO: 1280 - DNA, 20 bp, Homo sapiens
aggctgagccaatcttcaca

SEQ ID NO: 1281 - DNA, 158 bp, Homo sapiens
acaaaggcccaagtccgtataggacagtagcacaacggggaagaaatgtgtgtttttttttgttttgttttgttttttagtgctgatgaaaggtgttatatccaagggtaagttataaacagagaagctgtttctgattgtgaagattggctcagcct

SEQ ID NO: 1282 - DNA, 20 bp, Homo sapiens
cttgggcattggtcttgagt

SEQ ID NO: 1283 - DNA, 20 bp, Homo sapiens
gatgaactgctctggcacac

SEQ ID NO: 1284 - DNA, 121 bp, Homo sapiens
  misc_feature 61: n = A,T,C or G
ttcttagtgcctagcttcctcctttttctctggctatcttgaaatctaggaggaaggagcntaaagaccccgtggcctctgattgccatagcctctctaggcctggaagcttcagcttagg

SEQ ID NO: 1285 - DNA, 20 bp, Homo sapiens
accatggtgccacttcattt

SEQ ID NO: 1286 - DNA, 20 bp, Homo sapiens
cataagggccagaggatcaa

SEQ ID NO: 1287 - DNA, 140 bp, Homo sapiens
accatggtgccacttcatttcacaccaaagtggatggatcttatttatttattttttaagagttgaggcagcacagagaagctcagagattcattcaggatcatccactgtgtccaagctttgatcctctggcccttatg

SEQ ID NO: 1288 - DNA, 20 bp, Homo sapiens
aaagcaggcctcttggacta

SEQ ID NO: 1289 - DNA, 19 bp, Homo sapiens
ctgctaatgctggcagacc

SEQ ID NO: 1290 - DNA, 151 bp, Homo sapiens
aaagcaggcctcttggactatctgatctttgcaaaaggccccatgttgggccagcacaacagtctttgcatgtattgctccctatgttaaaaacaacaacatcatcatcattttagtatgtgtaaataataaggtctgccagcattagcag

SEQ ID NO: 1291 - DNA, 20 bp, Homo sapiens
acttaacctgttggccttgg

SEQ ID NO: 1292 - DNA, 20 bp, Homo sapiens
tttccagggcccttacttct

SEQ ID NO: 1293 - DNA, 260 bp, Homo sapiens
acttaacctgttggccttggctaggaaagctaaaaaagcaaggggtcagtactcttacaagtatcatgtcttaaacgtcagccaaccagtaattatttagatgccatcagaggggaagtcccatcccattgttattttttctctagactgtgagatgctttaaaaaaacctctctgtagggaaatgatctttaaaaaacaaacaaacaaaaagcctgagaatttagtgctgcatttgttgagaagtaagggccctggaaa

SEQ ID NO: 1294 - DNA, 20 bp, Homo sapiens
tcttaaacgtcagccaacca

SEQ ID NO: 1295 - DNA, 20 bp, Homo sapiens
ttgccctttgtaacatgcag

SEQ ID NO: 1296 - DNA, 257 bp, Homo sapiens
tcttaaacgtcagccaaccagtaattatttagatgccatcagaggggaagtcccatcccattgttattttttctctagactgtgagatgctttaaaaaaacctctctgtagggaaatgatctttaaaaaacaaacaaacaaaaagcctgagaatttagtgctgcatttgttgagaagtaagggccctggaaacggaggagtttttgttgttgttgttttggtgactgctttgccactctgcatgttacaaagggcaa

SEQ ID NO: 1297 - DNA, 20 bp, Homo sapiens
agaagtaagggccctggaaa

SEQ ID NO: 1298 - DNA, 20 bp, Homo sapiens
gccaagaatttgccctttgt

SEQ ID NO: 1299 - DNA, 94 bp, Homo sapiens
agaagtaagggccctggaaacggaggagtttttgttgttgttgttttggtgactgctttgccactctgcatgttacaaagggcaaattcttggc

SEQ ID NO: 1300 - DNA, 20 bp, Homo sapiens
tgtgggtgtggtctaccaag

SEQ ID NO: 1301 - DNA, 20 bp, Homo sapiens
ggagaaacatggcacaatgg

SEQ ID NO: 1302 - DNA, 262 bp, Homo sapiens
tgtgggtgtggtctaccaagtatcccaatagcatttcttacactgtgggctatggacccaaaggtctggaagagttgttttcatagggtcacactagaacactggctctttctggttaaaagcttccctagcctttctcctccaactcttaacacatctctcatgtttctttcccccctgcagaagtatagaaacctcctcttttcttttcctctgcactctcctcatctgtctccaagtccccattgtgccatgtttctcc

SEQ ID NO: 1303 - DNA, 1899 bp, Homo sapiens
gtttcaccatgttgcccaggctggtctcaaactcctgagctcaggggatctacctgcctcagcctccaaaagtgctgggattacagccatagccactgcgcccaacacaatgacttaatatttataatacacttagaacagtgcttagcatgtagtaagcactagattaaataaatgtataaaatgaaggaagaaataataatagtgtttttcttttaattcatgcatgaagaactatgttcgacttctgtatggtatcttgaaggggtccaaaataaatctgactggcagtttgaaggcctataagagagcatattacataatttcactcaaggattttgacaattagtccagcttgatggatctcttctcacctgtattttggccaaactgaccaattatttcccattccaactgccatccaaatttccttccccatcccttccacatgtttcagttgcttttgctgcctttgcttcatattgactgtcaggatgtatggccctgtaatactaggtttttatttaaaaagcctttctctcattcataagcttcttttgaggagtgaggcctgcatttctgatggttgtgtatcattcccatgccttgtgcataagtggtactctatccatgtgttttgattggctgatttgagcttttgcagattaggaaatagttggcctagagctaagtggcacctgagagaatcttcccctccaggcctcacagatgcactctgtggaaaggccattgtctccttgctttgtgttggactattaggaacctaaaagctaggacaggcctgggtagagatagccacctttaagttaggggaatgttggggagtctactgggatttgactgtgaggtgaaaggagggctgcctacaagcagaaagcttaaggcattggctttgtgtaattaccaggaatgcttttagctagcaccttgaacggttggttaaaaagggacagttagatgtttgttagatgtgtggtgtcaataaccttgaccagtagattcgtgactatgagaatttcaaaaggcgaagcaagaacacacacagagggaaaacatctcttgtttctaggggcagccttcccagcagcactcagcccagagctgtttttcccccaaggagaacacagggacaaaataaatatgccttcctgacccaaagacaggagcgcccagggagaccatgggatctgggagtgagagcagattgtagggaggaagtatccaggatgagactggtattagctacaggctggacagttagtcggtggcagctaggtactgctgctagtggctgagggcagggtttcttagagacctgaagatgtgagcattcatttatttgttccttcatcattcagcaaacctttactcagtgcttattatgtactggatactgggctgagcccccacttgtgacctcactgggcattgagtctgaggccttggcagctaagggtggtgttccttagggaactgggaggccatccagacaggaggcacagtacaaacaagaaagaactaggggccaggtatggtgtctcaggcctgtaatcctaacactttgagaggccaaggcaggtggatcacttgaggccaggagttcaaaaccagcctgatcaaaatggtgaaaccccatctctactagaaatagaaaaacagttagctgggtgtggtggcaggcacctgtaatcccaactactccggaagctgaggcaggagaatcgcatgaacctgggaggcggaggttacagtgagctgagatcgtgccactgcactccagcctgaatgacagagtgagactcctggggaagcccagccctgcatcagagaagtgatgcactgatgcttcacacacagagaatggaagcgggagtggag

SEQ ID NO: 1304 - DNA, 20 bp, Homo sapiens
ccatgcctaggttgtgcttc

SEQ ID NO: 1305 - DNA, 20 bp, Homo sapiens
cagcaagtggttccacactc

SEQ ID NO: 1306 - DNA, 394 bp, Homo sapiens
ccatgcctaggttgtgcttctgcatgttcagaggatgtggaaagcaattgaaatgattaaaagcatggaaaatcacatctctgaagagcgatgaaagtaggctatttaactaaaagaaaagaagattgaaggaagaaaataaatggtgtttaagtatagaaagagttcttataaagaaaaaggtgtccagatgtttcccccttccactgagtatattaagagaaaattgccttagacatttcatttttacaaaggaaggattttttcaagcaaataggattcttgtactgggtgtgacattggactagatgacctttaagatttttcttcactaagattctatgattaccagattgaggatgtacttatcaaaagagtgtggaaccacttgctg

SEQ ID NO: 1307 - DNA, 20 bp, Homo sapiens
tgcccaggagttacttccaa

SEQ ID NO: 1308 - DNA, 20 bp, Homo sapiens
cctccaaacacactgtcacc

SEQ ID NO: 1309 - DNA, 259 bp, Homo sapiens
tgcccaggagttacttccaacattcataacatgcctttgaagaagcaaatattgtatatagacaaacagcatatcagaaaaaaatcaaaacaaaaacaaaggaatactagcattaaagtaataataaaatataggatttttattttctactctttcagtatagccattagcaattcacagttagtttcttcattaactagataagataagtgaggcaaatcatgggacagtttagtattggtgacagtgtgtttggagg

SEQ ID NO: 1310 - DNA, 24 bp, Homo sapiens
tttccaattgaattatggaagaaa

SEQ ID NO: 1311 - DNA, 20 bp, Homo sapiens
cagagggcaagtgtggaaat

SEQ ID NO: 1312 - DNA, 183 bp, Homo sapiens
tttccaattgaattatggaagaaaaattaacttagaaaaccaagcaagcaagcaaacaaaaagccccaaacaacagcagcaaaacccgacttccaaaaagagttcacattataggcttacttttaaaaactgatctagaaacaagaagctggtttctaagtttatttccacacttgccctctg

SEQ ID NO: 1313 - DNA, 20 bp, Homo sapiens
gctggctctttcagtcttgg

SEQ ID NO: 1314 - DNA, 20 bp, Homo sapiens
tgctgtcccaaactttctca

SEQ ID NO: 1315 - DNA, 289 bp, Homo sapiens
gctggctctttcagtcttggtgtatacacacaaacacaaatgagatacacacacacacacatgtatattatacatctctgcatatataaacacatactttggtcatttatttttttaacagaataaaggtaattaatcaaaatacaattcattttaatagttgaggcttgacagagatcattatttcaagaaaagccaaggagaataagctccctttcatagtattgttttctttctaaacctctatagggtgcatggctcttaactactgagaaagtttgggacagca

SEQ ID NO: 1316 - DNA, 20 bp, Homo sapiens
ttgtgagcggagaagaaaca

SEQ ID NO: 1317 - DNA, 21 bp, Homo sapiens
catggaccagctaacagtcct

SEQ ID NO: 1318 - DNA, 260 bp, Homo sapiens
ttgtgagcggagaagaaacatctttaaatcatctcatctatgtgaaacctgtttttagagagtccagactttttctccttcattctgtgattccatcagtgatgctgaaatgactgatttataattctccttcctactgactgggaaatagaggtgtatcatagtggagggaccaggaaaatggataggtagatgaaagagaaccagaggaccctgtccacaacccacccacccagctgaggactgttagctggtccatg

SEQ ID NO: 1319 - DNA, 20 bp, Homo sapiens
ttgcatctttgcagtcccta

SEQ ID NO: 1320 - DNA, 18 bp, Homo sapiens
ggtgggtgcctgattgtc

SEQ ID NO: 1321 - DNA, 372 bp, Homo sapiens
ttgcatctttgcagtccctaaacagtctttcctctatgatactaacaggtttcactgcaaccagctcaccttcctggatctggttttaagcttggtgaaggcagtgctgataaggtctgacaatgtggggagtggtagaagaggcttggaatcttttactgtttttcatagcatttcagagagttggaaaatagcttcagggatcatctaatagaatttatttatttaaatgaagaaattgtggtcttgagagccttgttcagatgcacctggctaattaaaggtagagttagaatctgtaactactgattttctagtaacaagagcagaaagttctacagagccttccccatggacaatcaggcacccacc

SEQ ID NO: 1322 - DNA, 23 bp, Homo sapiens
ttgtttgacaggatctcactctg

SEQ ID NO: 1323 - DNA, 22 bp, Homo sapiens
tgggttatgtgagagtctcgtg

SEQ ID NO: 1324 - DNA, 402 bp, Homo sapiens
ttgtttgacaggatctcactctgtcccccaggctggagtgcagtgacatgatcacagctcactgcagcctcgacctccttggctcaggcaatcctcccacctcagcctccttagtagctgggactacaggcctgtgccaccacactcagcaaattttttagtttttgtgttttgttttgttttgttttaagagatggggtctcactatattgcccaggctggtcttgaactcctgggttcaagcaatcctcctgcctcacactccgaaagtgctgggattatagtcatgagccaccgtgccaggcccaaaaatcttttatttgtaaataactgaaacccaaactatcttaacagcaacaaaacaatttgtcataaggaatcacgagactctcacataaccca

SEQ ID NO: 1325 - DNA, 20 bp, Homo sapiens
ttgcccaggtgtagctctct

SEQ ID NO: 1326 - DNA, 20 bp, Homo sapiens
atgaggatgcaccatgtttg

SEQ ID NO: 1327 - DNA, 157 bp, Homo sapiens
ttgcccaggtgtagctctctgtctgcctggctcccttcaggggcttgtggattcagatctctgcttctctctgtacatctgctttctttcttttctctttctcagctagccactttcgctgctgctgagcacatggccaaacatggtgcatcctcat

SEQ ID NO: 1328 - DNA, 2001 bp, Homo sapiens
ggtttttaaaattttcccttgcctaggctatatcccagaccagctgaatcagaatccctggggacagagcaggggtatttgagtttttaaaacctcttcaggacattctgatgctcaacctgaattaagaaccacttgcttattgcctaggttagaaatttttatttgttttgttttgttttgtttgacaggatctcactctgtcccccaggctggagtgcagtgacatgatcacagctcactgcagcctcgacctccttggctcaggcaatcctcccacctcagcctccttagtagctgggactacaggcctgtgccaccacactcagcaaattttttagtttttgtgttttgttttgttttgttttaagagatggggtctcactatattgcccaggctggtcttgaactcctgggttcaagcaatcctcctgcctcacactccgaaagtgctgggattatagtcatgagccaccgtgccaggcccaaaaatcttttatttgtaaataactgaaacccaaactatcttaacagcaacaaaacaatttgtcataaggaatcacgagactctcacataacccaacagcatgaaatacaactggacttcataagagaccagagcctggaacaggagcatttacaaggacccaggcaactagtccctgttgcccaggtgtagctctctgtctgcctggctcccttcaggggcttgtggattcagatctctgcttctctctgtacatctgctttctttcttttctctttctcagctagccactttcgctgctgctgagcacatggccaaacatggtgcatcctcattacccacatttgtacgtccttagttcgacttcccagcccagggagactagcatcaatgaatctaaattcctgagagaggatctgatcagtctggcacaggtgatatgtctgcccttaatccaaccagacaacatggcttaaacatggctgccaagggcccacccatgtgtaggttaagattggaggctatttagctatctcaaagtgtatctttatgcttgccatattttttttcttttttgaaggaaattttgtattattttaattatttttatggacagaaaactcaacagtgtacatttaacccagttcagtggcaaagttctttaacctttgccttttcgagcttgataatgtgagctacagacttgagacccaggacattgcctccccagtgacagtggatctcatcgtatctgtcgtagttggtcctgatagcttccaccagcttagccaaagctcctttgtcttccgagttaacctttgtgaagacaacagtggtgcaggtcttcctgtggactagatgtcccagtcttgccttccccttgataatgcagtaagggaccccctttttacaacatggggcaggcaggcagaagacagccagctcgatgggatcgacatcgtgtgcagtcatcaccagctgagctttcttgttctccaccaaggtggtgaccatgttaactcctgctcgaaggacaggtggtctcttagtggggatgtcccctttgctggtagctttcttcttggcctgggccaacagcctctgcttcttctcttgctttgtctctggcctgtacttgtgggccagcttaagcagctgagtagctgtttggtggtccagggcctgggtgaactggttaatggcaggaggcacttacatccacttacagaggatggctctctgccgctgcaacctgatatagtggggccatttcacaaagcgggtgaggtctctttggggctggatatcctgtccaatgccaaaattcttaagccttttctcaaacaggggattcaccacttccttggcctcctgcttctttatgacagcaggagctggagccattttttctccttggctttctttcctttcagcatcttgggtggcgggaggagagacttatggttgccatatttttcatctagcattataccaaataactttgtttctaattt

SEQ ID NO: 1329 - DNA, 20 bp, Homo sapiens
aacagtggtgcaggtcttcc

SEQ ID NO: 1330 - DNA, 20 bp, Homo sapiens
ccaggccaagaagaaagcta

SEQ ID NO: 1331 - DNA, 262 bp, Homo sapiens
aacagtggtgcaggtcttcctgtggactagatgtcccagtcttgccttccccttgataatgcagtaagggaccccctttttacaacatggggcaggcaggcagaagacagccagctcgatgggatcgacatcgtgtgcagtcatcaccagctgagctttcttgttctccaccaaggtggtgaccatgttaactcctgctcgaaggacaggtggtctcttagtggggatgtcccctttgctggtagctttcttcttggcctgg

SEQ ID NO: 1332 - DNA, 23 bp, Homo sapiens
tgtgtcatttatggaatcattgg

SEQ ID NO: 1333 - DNA, 20 bp, Homo sapiens
gagactgctgcattgctcct

SEQ ID NO: 1334 - DNA, 363 bp, Homo sapiens
tgtgtcatttatggaatcattggcaattcctagaacatctattacagcactaaagtggtcagggttttcataaagttttgtggaagtctgaaccttattttcttaggtcaaagacatggtagaagcaatttataagtaatgttttattaataaagtgatttctaagtttatgataaatacaagtgacagatccagtggaatttattggctaatgtaattgcgaaggctaagaagtggatctaatgggtttccaacaatgtcatcatcgtttctgctgtaattccatctctctgctctgctttcctcctgttggtttcattcgcagcaggttttgccatatgggaggagcaatgcagcagtctc

SEQ ID NO: 1335 - DNA, 19 bp, Homo sapiens
ccagtggcaggaagacagg

SEQ ID NO: 1336 - DNA, 20 bp, Homo sapiens
tttgccacaggatgtgaaag

SEQ ID NO: 1337 - DNA, 153 bp, Homo sapiens
ccagtggcaggaagacagggccccagaggtaggggtggagcagttctccaaaggaaaggaaggtttcagttattagaaaaggggtggaaagaatatatgtccaccaatatatcacacaactgcatatagtgcactttcacatcctgtggcaaa

SEQ ID NO: 1338 - DNA, 21 bp, Homo sapiens
gggaagctcactgttgctatg

SEQ ID NO: 1339 - DNA, 20 bp, Homo sapiens
gctttcacttgatgggcttc

SEQ ID NO: 1340 - DNA, 159 bp, Homo sapiens
gggaagctcactgttgctatgtacccatgccttctctctctctctttctctctctctccctctctctctctgtctctctctttctaatgaagagtttagctttggagttaatgagcaaaagatttccttaccataaagtgaagcccatcaagtgaaagc

SEQ ID NO: 1341 - DNA, 21 bp, Homo sapiens
agctgcattcctttacttcct

SEQ ID NO: 1342 - DNA, 20 bp, Homo sapiens
aactgctgatgctgttcacg

SEQ ID NO: 1343 - DNA, 427 bp, Homo sapiens
agctgcattcctttacttcctatcagtttggggaagtagatttagtatccacaaaatgattgggggtcccctgtactgcaaagatttgactttaagaagtaggtggctgggtacgatagctcatgcttataatcccaacatattgggaggccaaggcagaaggatcgcttaagcccaggagtttgagaccagcctgagcgacgtagtagggacccattccgtatgaaaaaccatatatattagccaggcatggtggcgtgtgcctcccaaattggctgaagcaggaggattgcttgagcctgggaggtcaaggctgtagtgagccatgattgtgccactgcacgccagcctggatgacagagcgagaccctgtctcaaaataataataataaataaagaaacaggcccgtgaacagcatcagcagtt

SEQ ID NO: 1344 - DNA, 20 bp, Homo sapiens
gcaccctaatccagaccaga

SEQ ID NO: 1345 - DNA, 20 bp, Homo sapiens
ttgggcttctttgattcctg

SEQ ID NO: 1346 - DNA, 363 bp, Homo sapiens
gcaccctaatccagaccagactcaaagaatgctagaaatgaagggcagacataggacagtggcattttgagtaagaaatagggtttcaactggtgggagaaagaagaacctgctagactaagggaacagcatgaactaaagaccagaagtagaaaagtactactttttgtaccaaaagtagaaaagaccaaaagtgttgagggagaatgggaataattcctctctctctctttccttttttccctttattctttattcaataattatttgatgaatgtttatggtaaaccgaacagacacagctcctgcccacacaaagcttacagtctagaggaggaacaaccaggaatcaaagaagcccaa

SEQ ID NO: 1347 - DNA, 20 bp, Homo sapiens
agaatcctcccatcccactt

SEQ ID NO: 1348 - DNA, 18 bp, Homo sapiens
atgagctgtgcgcttgct

SEQ ID NO: 1349 - DNA, 381 bp, Homo sapiens
agaatcctcccatcccacttgccaggcactgagaaacaggactttccacttgtttgtcactggcaaggacttcatggcttcagagagggagctccaggggtttctgggacacttaccagtataaattccctgaggttcttctaagtctgtgcttgaattcattcattcattcccttcttatcttttctgaggaccccaagaattggcctgcctgtgtcctttgcttttacttgcagcaggtgggggtctggcacggtcgggggaagggttttgatgggaaaagtgaggctggtactatttttcctcccatgtttagcctatagagtatagtcataaaacttttcctcaatgtttcagtcctgaagcaagcgcacagctcat

SEQ ID NO: 1350 - DNA, 20 bp, Homo sapiens
agaatcctcccatcccactt

SEQ ID NO: 1351 - DNA, 18 bp, Homo sapiens
atgagctgtgcgcttgct

SEQ ID NO: 1352 - DNA, 381 bp, Homo sapiens; identical to SEQ ID NO: 1349

SEQ ID NO: 1353 - DNA, 20 bp, Homo sapiens
agaatcctcccatcccactt

SEQ ID NO: 1354 - DNA, 19 bp, Homo sapiens
cccacctgctgcaagtaaa

SEQ ID NO: 1355 - DNA, 244 bp, Homo sapiens
agaatcctcccatcccacttgccaggcactgagaaacaggactttccacttgtttgtcactggcaaggacttcatggcttcagagagggagctccaggggtttctgggacacttaccagtataaattccctgaggttcttctaagtctgtgcttgaattcattcattcattcccttcttatcttttctgaggaccccaagaattggcctgcctgtgtcctttgcttttacttgcagcaggtggg

SEQ ID NO: 1356 - DNA, 20 bp, Homo sapiens
agaatcctcccatcccactt

SEQ ID NO: 1357 - DNA, 19 bp, Homo sapiens
cccacctgctgcaagtaaa

SEQ ID NO: 1358 - DNA, 244 bp, Homo sapiens; identical to SEQ ID NO: 1355

SEQ ID NO: 1359 - DNA, 23 bp, Homo sapiens
tgtggtgctatataggtggtgtg

SEQ ID NO: 1360 - DNA, 22 bp, Homo sapiens
tgtaagcatgcagaagtgacaa

SEQ ID NO: 1361 - DNA, 800 bp, Homo sapiens
  misc_feature 501: n = A,T,C or G
cgcagcagggggaaaggaggacagaagtgtcaatgtttcgtttagaatttttctaaaaagttgccactttgggtgaagggctcagtaagaccttcccctccacactccacataactatgcttctattagaagtattctgagcagttcaggccttccacgtggtggaactgtgtggggtaccctcaagcccatgggtctctaggggttgtgcctaagtcacatgtatacgttccacctgtgatgttaggcaagcaagcatatgatcctttctcatcaccacttccatgaaacaaagacattttagaactgttgacgatagcaatgttttctcgacaaagagattacttgtaaagtagtaaagaacattagaaaaaggagctatagtcatatggtcactgttctttgtggtgctatataggtggtgtgtatattataagaacttttgtgtcttccaataatgttttttggtttttggttttttggtttttttttttttttttngagatggagtctcgctctgttgccagtctggagtgcaagggcacgatttcggctcacggcaaccttcacctcccaggttcaagcgattttcctgcctcagcctccagagtagctgggactacaggcacacaccaccacgcccagctaatttttactgttagtagagacgaggtttcaccatgttagccaggatggtctcgatcccttgacctcgtgatctacccacctcagcctcccaaagtgttgggattacaggcgtgagcctccgcgcctggccccaataatgttttaaacgagta

SEQ ID NO: 1362 - DNA, 20 bp, Homo sapiens
gccaggatttagaagccaga

SEQ ID NO: 1363 - DNA, 20 bp, Homo sapiens
aagagtggctaggccacaga

SEQ ID NO: 1364 - DNA, 368 bp, Homo sapiens
gccaggatttagaagccagaactgtctgtcctttttgtttgaaatagagactttagagactagtcttttcgtttactgaaagaaggagaaagaaaggaaaaaaaatttgtctactttgcctttggtctgggtactttccacttgtttgcttttaacctttctcagtgtttgcagggtgcagggaaacggccttgtcagcctgggctgggctccttaagtcttgaacaacaaacacttaaaataatcaaaatgttatatttggcagttaaaagaagaatctcctaaaactatgtctagtcttatttgtttctgaactcctggtagaggcggggagaccatgttctccattctgtggcctagccactctt

SEQ ID NO: 1365 - DNA, 20 bp, Homo sapiens
ctttgcctttggtctgggta

SEQ ID NO: 1366 - DNA, 20 bp, Homo sapiens
agagtggctaggccacagaa

SEQ ID NO: 1367 - DNA, 254 bp, Homo sapiens
ctttgcctttggtctgggtactttccacttgtttgcttttaacctttctcagtgtttgcagggtgcagggaaacggccttgtcagcctgggctgggctccttaagtcttgaacaacaaacacttaaaataatcaaaatgttatatttggcagttaaaagaagaatctcctaaaactatgtctagtcttatttgtttctgaactcctggtagaggcggggagaccatgttctccattctgtggcctagccactct

SEQ ID NO: 1368 - DNA, 20 bp, Homo sapiens
cttgacctggtccttgttcc

SEQ ID NO: 1369 - DNA, 20 bp, Homo sapiens
gccgatattcagccacctta

SEQ ID NO: 1370 - DNA, 421 bp, Homo sapiens
cttgacctggtccttgttcccttgaagtcttttgtttgtctgtttgtttttgagacagggtctcactctgtcacccaggctggagtatggcggcacgatctcagctcactgcaacctccatgtcccaggttcgagagattcttctgcctcagcctcccgagtagctgggattacaggcacctgccaccacattcagctaatttttgtatttttagtagagatagggttttaccatgttagccaggctggtctcaaactcctgacctcaagcgatcctcccacctcagcctcccaaagtgctaggattacaggcatgaaccactgcacctggccccttgaagtctttatagtcgccccaaagaaattaggctaaacttaagaagtcactgcttctgtagatctaaggtggctgaatatcggc

SEQ ID NO: 1371 - DNA, 19 bp, Homo sapiens
ctccatcctccctgctctc

SEQ ID NO: 1372 - DNA, 20 bp, Homo sapiens
ctgtttcacgggtgtcttga

SEQ ID NO: 1373 - DNA, 161 bp, Homo sapiens
ctccatcctccctgctctccgattgccccagtgtgtgtgtccccttccccagccacccctctgatccctgactaccctcttctccctccctccctctgcgcccactcctcatcgcgggcctcaggggagccctgtctccactcaagacacccgtgaaacag

SEQ ID NO: 1374 - DNA, 20 bp, Homo sapiens
tcctcttgcacgtagttcca

SEQ ID NO: 1375 - DNA, 20 bp, Homo sapiens
ccaaagctaagggcagtcag

SEQ ID NO: 1376 - DNA, 270 bp, Homo sapiens
tcctcttgcacgtagttccagtgtgaagtactctggcaacttcaattgaagacataaagaatcttatgtgtgtgtgtgagggtttaattttatttttattgctgctttgagaccaggattgtgttttcccttctgccagttacccttttcccgctcaagctccctggacctccgcattctttcaatagttttagggcaggaattggcaggtgttaggggcagagagacgcccatgtctgggtgctggcttctgactgcccttagctttgg

SEQ ID NO: 1377 - DNA, 22 bp, Homo sapiens
ggagaaactgagatgaggcaga

SEQ ID NO: 1378 - DNA, 20 bp, Homo sapiens
gcccaatcataaagccaact

SEQ ID NO: 1379 - DNA, 363 bp, Homo sapiens
ggagaaactgagatgaggcagattaaagtcttttccaaaaccacatgaggaattaatttcaaagcttgagattaaaacctacatcttgtagtttcagattattaacttaccagtgtgatctacaagttctttctccatgttctaaaaaacaaattttttaaggcaatcaagacattttcattctctcatgtgagcagtatgtatcagaaaaattcatctgtataaactgtatggcagtctaaattatatttttaacctgtcttttctttttttactttttataaatcatatcttccactgtttacaaattttgttatgtctttcacatatcagactcaaaaacagttggctttatgattgggc

SEQ ID NO: 1380 - DNA, 20 bp, Homo sapiens
tggccaaatcatcctctctc

SEQ ID NO: 1381 - DNA, 20 bp, Homo sapiens
ttgccatccatcatcttgtc

SEQ ID NO: 1382 - DNA, 145 bp, Homo sapiens
tggccaaatcatcctctctctgaccatgacaaaagtgtaccagtcgtagctaaagcaagactgaatctatttggtattcattgtaaaggaaacaacaacaacaaaaataactaataaaggtctgagacaagatgatggatggcaa

SEQ ID NO: 1383 - DNA, 20 bp, Homo sapiens
cctgccagagtaaaggcaga

SEQ ID NO: 1384 - DNA, 20 bp, Homo sapiens
atgcagcacttgtaccacca

SEQ ID NO: 1385 - DNA, 277 bp, Homo sapiens
cctgccagagtaaaggcagaatatttgaattctcttgtatttgttttagtttagttattgactatgtttttcttcctataaagtaaatatgtttcattctttctgcacaggttttcctataatgcctgggtgcttctagctagagagggcaaattgatttcatcttccattcaactccagaaggtctatagtggccgcttggactgctgtaatggagttgctcagcagccgctcccatatgctctatgatggggcagtggtggtacaagtgctgcat

SEQ ID NO: 1386 - DNA, 2001 bp, Homo sapiens
tggttgccaaaaagaattagcagaattctgctgtttatgtattgctgaatcagtttacaggtgatgttttattactagggaaatattgctaaagctaggtagaggtgcttctaagaactaaagcaccagaaacctaattgggaaaggaattaactttagtcatgtacatattttcatttttctcctttaatttttatattaacagaaaccctgtgaggcaggtgttttacctacattttcacaaatgagcacacagcctcgaacaagttaattcctcagaatcccacagccagtgcatgctaaggcccaagtccccttcatcctccattctcccaccggtcatagctaagtcttcaagctaatgttcacctgccagagtaaaggcagaatatttgaattctcttgtatttgttttagtttagttattgactatgtttttcttcctataaagtaaatatgtttcattctttctgcacaggttttcctataatgcctgggtgcttctagctagagagggcaaattgatttcatcttccattcaactccagaaggtctatagtggccgcttggactgctgtaatggagttgctcagcagccgctcccatatgctctatgatggggcagtggtggtacaagtgctgcatccctgctaccgaggctgctgctttagtatctttacttcactcttaaagtggggaatgagagaaattgtctaaagtcctaacacaagacagccatacctacttcccaaagtagtaaacactctgctgctgcatgtagaatgaaatagagcagtgaaattataaaggagatttgcagtctaataattgggagggaaaatgaagtataaggctaaatgaagtagactacaaacacctgaagcatgactacaaaatcaagttgacattttgtggctcattttcagggtagctgccggaatctggttatggtcgttgtttttattttttagggttttcccccatctgtgtacagtgagatagcaaccacaaaaaaactaacagccttcctgagtctcttggctgtagagtacccagctcttttccctgaagcttgccctgaagaggcctggtgatacatccctcttgggagatgtgacatggttccatattgacattacccactgggctcattgcttgagtctcaaggttgtttatgtatttgatgtttcatttaaaaataaaagttacttacggcaaaaatagcctagtgccagtgggtttggctattgtaaaatttagaaacccatttaggaaaccaccatcaggatcttgttggtgctgtatcagcttgggcatattgcccttcagcacaccggctcttgcacagattgcgtccactgagttgaattatggaaaccttccgtgagaaaatgagagcactcaggaagtagtattggtgatccacaaagcattgctgtgtcctctaaggttctttcctggtctcataccatggtttcttcctgggtaaaaagtgaaactggggttctgcctttctcaagggaaaacgtgtttgctgcttggctttggaattttggggcaactcagtcagtgacatttctctttcacaaactcctcctgttctttcaaataggtgccatatctttcactttccctatcgatacttcatatgttatgcctggctgctaggtttcattccagagcctcttgtgtttaagtaatgaatggactaatcataatgactagctcagtacaggttgctgagttggagaccatggcctagtcatttctctgatcacacagaagtcatttctggacaaaaagtgctacatactatatatctatatctgtctatatatttttttcttgatctttcttctattttgtgctgcaaaaacaaacttcgaggggatgattctctcacaggatatggaaatggccttggacaatgtccagggttagtggcacagctgctgtttcctgcaagggacatctcaaatccagaagggaaaaaagacaaag

SEQ ID NO: 1387 - DNA, 20 bp, Homo sapiens
cgacatttattgggcacctt

SEQ ID NO: 1388 - DNA, 20 bp, Homo sapiens
tccactggaagataccagga

SEQ ID NO: 1389 - DNA, 375 bp, Homo sapiens
cgacatttattgggcaccttatatttgtgtgtgatgtaattttaagcactttcataccagacatgttaattatcttcattttaaagatgaggaaatgaaactcaacaaagaaattaagtaaattgcccaatatcacacaactcccatatagtcaatcctggcactttccctcagcagattctaagcaccgttggagcagagagcaagtctgtttttaatcattctgattttcctagtgcctaggacagggtctcactctggcacataataggtgctcagaaaaaaaatgattgaatgaataatgagcaaatgtgctgtaagctgaactggaatgcattgagtcttgtgttgtacttcctggtatcttccagtgga

SEQ ID NO: 1390 - DNA, 2001 bp, Homo sapiens
ttctaagcaccgttggagcagagagcaagtctgtttttaatcattctgattttcctagtgcctaggacagggtctcactctggcacataataggtgctcagaaaaaaaatgattgaatgaataatgagcaaatgtgctgtaagctgaactggaatgcattgagtcttgtgttgtacttcctggtatcttccagtggatgtcaacatgatataatgagaagattctgagaaggaatcagtgaaggcatgcatgttcctgactgtgaaacttttgctcttctcagagctatacaacctaggtgatagacttccttttctttcattgggaaaactgaggcaaagtttccttggcaaagattttgcaagtcagtggacaatttgtggcacaactgaaatcttgagattctcacctttatagccctaaccacttaacaaccctgtggtcctggtggggttatagctttccataaatctggtacttaatcatttaaagagatggcaatttatcttaaatacacgcctcattatagatgtgtcacacttagcacagatggtctcagaagtttttcctggcttcccataccctaacagtatctagtatgttaatgtcaatattagctttactgttttaggtaactttggtatgcttctcattagctgaaaccgtaaagagctcagttttacctgcgctgagggatcactaaattcctattggcatctgaatgcacagtcccatgtcgaaagtgaggtcatgtttctcctggattatgcccgtatctgatgagcctcggctggcgtgaatccgagacaatgaaataatcacacccattagctcaccagggccctattaagatgtggcctggctttccatccatttctcctgcttggaaaaactgacacagtcatggtttgtaaaggttagtgcagatggaactgcttcaacaaccaaaacttagcgttaccctatttaaacttgggaagggtctgctgcttaatcttaaaaaatagcacttcaggagccagggtgtgaggatgtcctttaatctctttgtatgtgatggtaaagctgaattttcctaacaccctccttccccgctctcagcttcagtggctggggtgggtgaggtgggggagctctggagttgtggtttccatactttctactttttattctatttttctttagagatcccaggttttgaaggcttgagtctagtaaacaaactgtaatggttaaatcacgattttattttctcgttgacacctagtgtgtgttatatgcagcgtcctctgcctcatgtcattctccaatatgctttctcagggctactttcccagaccctatgccttcttatgggttgtagctaacagttacacttccagagtatgccgtccctcacccacagagctcttctcacaactgtaactaactgattatttgtgtaactgtttgcatgtttaggctgtaaggatgcagaccatgtctgtcttgctcacagctgtttctctagtgcctaagtctttgcttgatacatagtgggcacttggtaaacatttgttgaatgcattaatgaatcagcttatttaattctagtgaaaaatataaagaaatatcccccttatattggcttggggagccttattctggatatatttgataggatttttgaaatgttgtcaacaacttgaatgaaaatcaccaagtttaaaatgaaggttcactctgggcaggagagaagatgatgctattggagaaggattacacaagaggcttctggaatattgataatattctatttattaagctggaggactcctagggacccaggggcctcagacttactcctgaactggagggacatgccaaataagccacctgctatttatttcacgcacacccaaggcaaagctgttggggccacttaaggattttgtaaaatgtgagggtgttattaaagtaggcttattattttacagctcttatgattgttcacctaactac

SEQ ID NO: 1391 - DNA, 21 bp, Homo sapiens
tgatcatggtgcatttctgtt

SEQ ID NO: 1392 - DNA, 21 bp, Homo sapiens
tccacttattgtggcactgtt

SEQ ID NO: 1393 - DNA, 422 bp, Homo sapiens
tgatcatggtgcatttctgttaaaaaagccatagagttggccgggcacggtggctcacacctgtaatcccagcactttgggaggccgaggcaggcagatcacaaggtcaggagatcgagaccatcctggccaacatggtgaaaccccgtctctactaaaaatacaaaaaaattaaccaggcatggtggcgggcgcctttagtcccagctactcgggaggctgaggcaggagaatggcgtgaacccaggaggcagagcttgcagtgagccgagtttgcgccactgcactccagcctgctcaggcgacagagcaagactccgtctcaaaataaataaataaataaaaagccatagagtttctttataattaggttctaacactacttcttcctattagtcaataacagtgccacaataagtgga

SEQ ID NO: 1394 - DNA, 20 bp, Homo sapiens
tttgacatcagcgccataag

SEQ ID NO: 1395 - DNA, 21 bp, Homo sapiens
agcagagagcctgacatagtg

SEQ ID NO: 1396 - DNA, 172 bp, Homo sapiens
tttgacatcagcgccataagatattttgtgagaggacagagtggcctttctaattcttaaaagttagggttctactccagacattccttatctactgcaaatacaaattatttatttgttcattcattcaaataacagttattacagatgacactatgtcaggctctctgct

SEQ ID NO: 1397 - DNA, 23 bp, Homo sapiens
gggttctactccagacattcctt

SEQ ID NO: 1398 - DNA, 23 bp, Homo sapiens
gcaaatcaactccaatgactagg

SEQ ID NO: 1399 - DNA, 1001 bp, Homo sapiens
  misc_feature 501: n = A,T,C or G
gatttgggattaggaggctcaagggggatggatatgtagagaaaagacctaggaagaacaagaacagggactggcagaaaacacattctgagacaaaggccatttatttagctctggccagttggtttatctagcctgacatttctcaacctgggcgctattggcgttttgtgccaaattattcttgattgtagagagctatcctgtgcattatggtatgtttagtagcatttctgcctcttcccactgggtagatgccaatggcatcccttcatttgtgacaaccaaaaatgtctccagacattagcaaataccctggggagtgggaaagggagagagaggaagaattgtctccggatgagaatcactgatctcactcaaggttttatctttgacatcagcgccataagatattttgtgagaggacagagtggcctttctaattcttaaaagttagggttctactccagacattccttatctactgcaaatacaaattantttgttcattcattcaaataacagttattacagatgacactatgtcaggctctctgctaagtctaggtgaaaagacagaacctccccacaaagacttagaacttaatactcttaaaaatcctagtcattggagttgatttgctcaccaatgctaacaaagttaagactttgaggttgtattcccttatctggctttaactcagaccaaccatttcactgattggaccagcacaatgtatcctggctactctaaaagtcacttaaaaaaacatatcctactggtggtatgttgatagtttcctgggatatgaaggtgggcatggttaaagctgaaaggactcttagcgacaagtgaaaaaaacctctttggtaaatcactagcatagtattacatggcttttttttggcctgggtgcagccccctttagactcaaaccactgttcttcctgataacacatggccttatttatgttcattgtatttatttagcttattttga

SEQ ID NO: 1400 - DNA, 20 bp, Homo sapiens
gaaggtgggcatggttaaag

SEQ ID NO: 1401 - DNA, 22 bp, Homo sapiens
ccttggttccttctaatgggta

SEQ ID NO: 1402 - DNA, 280 bp, Homo sapiens
gaaggtgggcatggttaaagctgaaaggactcttagcgacaagtgaaaaaaacctctttggtaaatcactagcatagtattacatggcttttttttggcctgggtgcagccccctttagactcaaaccactgttcttcctgataacacatggccttatttatgttcattgtatttatttagcttattttgattcctctttctacataagaaaccacaactggaaaaatcaattaatttttaatttgctcataaatttctacccattagaaggaaccaagg

SEQ ID NO: 1403 - DNA, 2001 bp, Homo sapiens
tgttcagggtcttcttcacctgtgcattctgctgccctgcgttatcagagttagaatcagggtggaatacaaatatttccccaggcat[450 bp omitted]tattttcttccggaaaatcttgttgtttacgtggttggaactttattattacacagattattataaaaatgaaccaacactcaaaagtacaaggcaggatttcccacaatggctatgtcctggctggccttgttgctagctggcacagtaatatgccacctggaagcaatgaccattggaaaagaagccaggaaaaaaccttatgagaggcacagggcagtagataatttgtgaagcggtcgtttgcctcccagagtggcaaggctggcatgtctggcctaagtgtacactcacgtcatttatcacatcctctggtagcagcgcctctctccactgcctgtgaaggaaactgttgcacaatcctgaagatctgactgaaggaaagttgtcttgggatcagaattaaggttcctttttcttgttttcatttccgagttgcaagttatgcccctttttagcgttcccatacccagctgtctacattttaagcaatcgttatatggaattatatcttaaatgtaaaataacaagaattcatttaaaataactgctttccctccagaaccagaggtatctcaccaaagctgtcacctccccaccagtatactccaattgtgggtgacagttgtgtttagaaagtggtgttatagctccttttatgtaggatgattactctgtggccatgaccttctgggatgaacggaaagggctggacagagttacacagcacgacgacagaggagaagcttgtggaagtgcattgcaaacagagatgggcgagttaagttactcaattgccatctgcctctgttttgctaactcattagttcggacaccacattgtgttaatccccacttccctggctctgagcttggtccaggtctcgggggaacagtgagactgctcagctcgaccctcctgtcagctgggcctcagcttctctgcatcgacagcatgccaggcctgccaccctcgctgccacatcacatcaaggtgaagttttctccccagcccctggcaacagaaattgaagcctttggacttcgctcattcttccaaaagacttttctaggcagtgggatagattttcgccttacaccccctagcactctcttcccttccggcactccttcaaggcaactgcaatttcaggctgaccatcttggaagtttgatggcactgagtaccaccagccaaatgctctcacattttctgtgcctctcagaagaagagcccatatggcagctaagaaccaatgagtgaggcctaatttgtcccccaagactatacgagaagggcagtcttacttctggacctaatctagcattacgagcatccagtgatgacccttacggtactttctgagagtagttgctcataatcatcattgtctctgctggtgagctgactgggatacgcaaattgttcctatcaatttattttgacctctctggacttcagt

SEQ ID NO: 1404 - DNA, 20 bp, Homo sapiens
tcagcttctctgcatcgaca

SEQ ID NO: 1405 - DNA, 20 bp, Homo sapiens
tggaagaatgagcgaagtcc

SEQ ID NO: 1406 - DNA, 126 bp, Homo sapiens
tcagcttctctgcatcgacagcatgccaggcctgccaccctcgctgccacatcacatcaaggtgaagttttctccccagcccctggcaacagaaattgaagcctttggacttcgctcattcttcca

SEQ ID NO: 1407 - DNA, 20 bp, Homo sapiens
atgtgtgaggaagcctctgg

SEQ ID NO: 1408 - DNA, 23 bp, Homo sapiens
tgtttcttcttgggagctatcta

SEQ ID NO: 1409 - DNA, 422 bp, Homo sapiens
atgtgtgaggaagcctctggattcagttgttttgtttttttaagtaactttttaaatgaagtataatatgtaaacaaaaaagtgtgtacatcgtagtgtatagctccatgaactttctcactgagcacacatgtaaccagcacccagattaagaaacataacattaatagcgcccatggaagctcctccttcctgtcatgaccccatcccacccctccaccctcatcccaaaggtaactaactactatctggacttctacaaccatggattagttttgcctgtttttgaactttatataaatggagtcatatagcaggttctctttggtactattttcttttactcaatgttatgtttatgaagtttattcatgctgttttattaacccatagaaaatatagatagctcccaagaagaaaca

SEQ ID NO: 1410 - DNA, 21 bp, Homo sapiens
cctccagaattaggtgggaga

SEQ ID NO: 1411 - DNA, 22 bp, Homo sapiens
gggtcatcagaaacaatgtgaa

SEQ ID NO: 1412 - DNA, 153 bp, Homo sapiens
cctccagaattaggtgggagataaattattaaatttatgagacttgtctttctttctttctttctttctttctttctttctttctttctttcttctttcctttcttctttcttttcatgtagcatttctttttcacattgtttctgatgaccc

SEQ ID NO: 1413 - DNA, 21 bp, Homo sapiens
cctccagaattaggtgggaga

SEQ ID NO: 1414 - DNA, 22 bp, Homo sapiens
gggtcatcagaaacaatgtgaa

SEQ ID NO: 1415 - DNA, 153 bp, Homo sapiens; identical to SEQ ID NO: 1412

SEQ ID NO: 1416 - DNA, 20 bp, Homo sapiens
tgggacatgcttgtgaagag

SEQ ID NO: 1417 - DNA, 20 bp, Homo sapiens
tttagaccagaacccgaacg

SEQ ID NO: 1418 - DNA, 375 bp, Homo sapiens
tgggacatgcttgtgaagagatacttgaggaagttaaagcaaggtcatctccattgcctaagccccacaccctggtaaactgcacactgtttggaccttgaaacttgtgagctgcgaattcctgtcataaatggagttttcctccctcctgtggccccagtttgtggtgagccttgtgttggcatggtggccatggggacacccctcgtgtgtgtgtgtgtaggcccccaaaaggagaagtgtagcagcttccctcagccttgcctcagaaagccgggtccagatggccaaggaagcacactgcattgaaggaactctgcagccagagtgaatttaccagtgtgggaaacaaaaacgttcgggttctggtctaaa

SEQ ID NO: 1419 - DNA, 21 bp, Homo sapiens
tgccaagagaggtaaccaaga

SEQ ID NO: 1420 - DNA, 20 bp, Homo sapiens
tgatgggtaaacctgtgctg

SEQ ID NO: 1421 - DNA, 255 bp, Homo sapiens
tgccaagagaggtaaccaagattctcagtcccttccccagttcaaatggatggtccaataaagaaccatgctcagcaagtgccaggggcctagttttaaacaggagaagctgaattgaatggatgatgaattgaatgaatgaattgaatccttctgatccctagtctcgcactcagactcccgtctttaagctttgttactatgaagttgtgtttgctgggacttggccactggtcagcacaggtttacccatca

SEQ ID NO: 1422 - DNA, 20 bp, Homo sapiens
ctgcagggtcctgctttcta

SEQ ID NO: 1423 - DNA, 20 bp, Homo sapiens
agcggactggatattctgga

SEQ ID NO: 1424 - DNA, 971 bp, Homo sapiens
  misc_feature 488: n = A,T,C or G
gggtagggcacagcgattcaaagacagcgcatggagtggtgcattctcaaacttcctggaacaagtgaggttctcgatgaggaactcattcatatcatcaaaataccaaagactcaaagttttttaataaggcaggaactattgaggtcatttaccccttcttgtcatggatgaggaaactgaggctcagtgaggttaggtaactgctcattaccaaggcctactctgaggttctttgttacactactctccttctcccacctggtctcatcaaaagcccagacggagtcagaaatagaactgcagggtcctgctttctagccagcagctggccacaggctatcatgcattacatggaatgtgcttcaggacgtgaggacaagagatatgaacgagaatgcagttccagtggtaacataccatcttcttccctggatttatttcaatcctgaaaacatttgtaggtattgttattcctttattttttnaaaattccctctttctactctaaataaatgggctttcatctggcaggactggagggaccaaatatccagaatatccagtccgctaaggccatgaacttttccttcccctctgttcctattttgggagtcattgctttgtttttttgacttttttttttttaacatggaaaagcattcttttaaagttgacccttttgctgcagggcaaatgcttttctgttatgcactagagattcagtttgatctcctagaaatgcttagcacaggagtcataaattgaaatgttttcagagaaggagctttctcattaagagctttccaacaggcctcttctaaatactgacacgggttggtaccagaagcccatcacctttttggaaatcaaggctacatagcaacctggttatcctcctccagtctgattgcacgagggctacaccccatgtatacagagcagagagacagctccttgccttgtgagaa

SEQ ID NO: 1425 - DNA, 20 bp, Homo sapiens
aaggaacctctctcccttgg

SEQ ID NO: 1426 - DNA, 20 bp, Homo sapiens
ctcctctggcgggatctagt

SEQ ID NO: 1427 - DNA, 139 bp, Homo sapiens
aaggaacctctctcccttggtggcatggttccaggtcgctgtacttgttctcttgttttctactccagctcacctgctgtttttaggcaaggaggattatgtgagtatgtgtgtgtgtgactagatcccgccagaggag

SEQ ID NO: 1428 - DNA, 20 bp, Homo sapiens
tcccatttccatctccacat

SEQ ID NO: 1429 - DNA, 19 bp, Homo sapiens
ttccagcggaaccctctta

SEQ ID NO: 1430 - DNA, 173 bp, Homo sapiens
tcccatttccatctccacatttgagataagaatacctgtatctttcctaccacccacaaacaaacaagcaaaccatgggactccctttgaaaaaagtcaatatatccaagaaatcactatttctgaatgagctcaagtagagagaactttctcttaagagggttccgctggaa

SEQ ID NO: 1431 - DNA, 20 bp, Homo sapiens
cctgtgctcacctctctcct

SEQ ID NO: 1432 - DNA, 20 bp, Homo sapiens
gggttagaagctgtgctgga

SEQ ID NO: 1433 - DNA, 381 bp, Homo sapiens
cctgtgctcacctctctcctccagtaagaacctaagggcccaggaggtatagtggtgcctcccatagatacttcccttccctcatggatgatacagaatgacatataaatgatatctatttcttcatttttttccttgcaaagtcacttttccacatactaatccatttcacggtttatctttaaatcctttctcagttgtctattcttctctgaaagtattatcccagcatcctaatgaagattccatcaatgtctagtaaaatgacaaaactctctagcagtactatgttttgtttttggttttggtttgtttgttttgtttttactggtgcctctttataataaaaagatttggtggctccagcacagcttctaaccc

SEQ ID NO: 1434 - DNA, 22 bp, Homo sapiens
cagcatcctaatgaagattcca

SEQ ID NO: 1435 - DNA, 20 bp, Homo sapiens
aacattccaatgcaggtcag

SEQ ID NO: 1436 - DNA, 258 bp, Homo sapiens
cagcatcctaatgaagattccatcaatgtctagtaaaatgacaaaactctctagcagtactatgttttgtttttggttttggtttgtttgttttgtttttactggtgcctctttataataaaaagatttggtggctccagcacagcttctaacccttcaacagctgtgcctataccaagctgttctctcttatttgtaactatttatgcagtgttctctccagatatactgttccatactgacctgcattggaatgtt

SEQ ID NO: 1437 - DNA, 20 bp, Homo sapiens
aacaagagtgaaactccatc

SEQ ID NO: 1438 - DNA, 20 bp, Homo sapiens
atagagacagtaaaggccat

SEQ ID NO: 1439 - DNA, 413 bp, Homo sapiens
  misc_feature 62, 68, 70, 76, 80, 119, 142, 153, 304, 364, 368, 406: n = A,T,C or G
accagcctgaccaacatagagaaaccccgtctctaccaaaaaaaaaaaaaatacaaaattancccagntntgttgntggncgcctgtaatcccagctactcggaaggctgaggtggganaattgcttgagcctgggagtcgnaggttgtggtnagccgagatcgtgccattgcactccagcccaggcaacaagagtgaaactccatctcaaaaacaaaaaaagaaagaaagaaagagagagagagagaaagagagaaagaaagagagaaagaaagaaagaaagaaaggaaggaaggaaggaagnaaggaaggaaggaaggaaggaagaaagaaagaaagaaagaaagaaagaaagaaagaaagnaagnaaggaaaagaatggcctttactgtctctatttctactnacattct

SEQ ID NO: 1440 - DNA, 20 bp, Homo sapiens
tggattgtttgctctcagat

SEQ ID NO: 1441 - DNA, 18 bp, Homo sapiens
taatgtcactgcctggga

SEQ ID NO: 1442 - DNA, 355 bp, Homo sapiens
  misc_feature 52: n = A,T,C or G
atctgcaaattgggaatcaggaatccttgctttcgtgggtcatgccagtcangtggattgtttgctctcagatccgctccctgcccttcccctgctctacttgataccacagggaactgacctttacaatttgcatttcccagtctccctttccattgagtctggttagtttggagaggagggatgaagggcagaagtatgagagaagccatgtatttttgtacacacacacacacacacacacacacacactctcacacacacattcctctgccttgcttccagtggtgtcccaggcagtgacattagttcctctccacgatccctttgctgtccccactctagttgggcagct

SEQ ID NO: 1443 - DNA, 27 bp, Homo sapiens
ttcatttattctttatgctaacctgtg

SEQ ID NO: 1444 - DNA, 20 bp, Homo sapiens
ctttgctgggagagtggaac

SEQ ID NO: 1445 - DNA, 269 bp, Homo sapiens
ttcatttattctttatgctaacctgtgatattattattattattattattattcacacttaacacttaaggaagtggaggctgtgaaaagttaagtaacttgtccaagccgacttaatcaataagaggagctgcagtaaagtggaatgaaactggggctgtgaacacctaaagaatgacccaggttgttgctccccctgaaacttcacaaggcctgggcctcatgcagtgcactgctcattcaccctgtgttccactctcccagcaaag

SEQ ID NO: 1446 - DNA, 22 bp, Homo sapiens
gggcattgtttgaggaaataag

SEQ ID NO: 1447 - DNA, 20 bp, Homo sapiens
tgccaccactgctgagtcta

SEQ ID NO: 1448 - DNA, 199 bp, Homo sapiens
gggcattgtttgaggaaataagcaaattccacaggtggaaagaattgtgaattgtgtgtgtgtgtgtgtgtgtgtgtgtgtgttttgaggtgaaagaggtttagggaaaatttgaaaagctattggaatggaaattaaaccatccagagtgttttattttagagggatagggtttaagatagactcagcagtggtggca

SEQ ID NO: 1449 - DNA, 21 bp, Homo sapiens
gccttaagaggagctatttgg

SEQ ID NO: 1450 - DNA, 20 bp, Homo sapiens
tgcaggcactctttgtgaac

SEQ ID NO: 1451 - DNA, 161 bp, Homo sapiens
gccttaagaggagctatttggtacatattcacatgtgggatgtgtgtgtgtgtgcacatgtgtgtgtatgtgcataaccctcaaactgatattaagataatgttactaaatcactacctaattggagatagaaaaactaaagttcacaaagagtgcctgca

SEQ ID NO: 1452 - DNA, 24 bp, Homo sapiens
ccagagaggtgttatacaagagca

SEQ ID NO: 1453 - DNA, 25 bp, Homo sapiens
aagtaagctgatctgaatccctaaa

SEQ ID NO: 1454 - DNA, 183 bp, Homo sapiens
ccagagaggtgttatacaagagcataatgatattctatgaggaaataggatcttataacctcagggtcaaaattcctaagagactcttcccagagactacaattatattatttatatatcatattattatattgtatattattatttatattatattttttagggattcagatcagcttactt

SEQ ID NO: 1455 - DNA, 21 bp, Homo sapiens
tttcttctaccatgccattcc

SEQ ID NO: 1456 - DNA, 20 bp, Homo sapiens
ttcggagatggttcaatgtg

SEQ ID NO: 1457 - DNA, 415 bp, Homo sapiens
tttcttctaccatgccattccccttctaagggatatccttaaaattcacattgaaccgggccaggcgtggtggctcacacctgtaatcccagcactttgggaggccagggcaggcggatcacgaggtcaggagattgagaccatcctggctaacacagtaaaaccccgtctccactaaaaatataaaaaattagctgggtgtggtggtgggtgcctgtagtcccagctactcaggaggctgaggcaggagaatggtgtgaacccaggaggtggagcttgcagtgagccgagattgcgccactgcactccagcctgggtgacagagctagactctgtctcaaaaaaaaaaaaaataaataaataaataaataaataaataaataaataaataaattcacattgaaccatctccgaa

SEQ ID NO: 1458 - DNA, 20 bp, Homo sapiens
ggctggagagttcatgcttc

SEQ ID NO: 1459 - DNA, 20 bp, Homo sapiens
gaatgccaccctgtgtactg

SEQ ID NO: 1460 - DNA, 390 bp, Homo sapiens
ggctggagagttcatgcttctaactaaggaacaggctgcagccttccctttccttccccttctaaaatgtctgcttcttaatggactcacaaagcggcatgtttgtttggtgcagctgagctccacagcggggactctcaggtccacgaaatttggggtgagaactacgacctttggctcttagcctttgacttatgctatccaagttccttggtaaatatttttttttacaattgcaaatagtgttttctgacaaaggagcagagattttaacaccagattaagcaaagcaaacagcaggcctctttgttacatactctctacgggtgtataactaataagcaatcagaaagctggacttttatttacccagtacacagggtggcattc

SEQ ID NO: 1461 - DNA, 20 bp, Homo sapiens
gaaaactgtcgcaacccatt

SEQ ID NO: 1462 - DNA, 20 bp, Homo sapiens
aggatcggacaaagctgatg

SEQ ID NO: 1463 - DNA, 296 bp, Homo sapiens
gaaaactgtcgcaacccattggtgggtcatgaagtgaaattgatgaatcacaaccagcatttgaaaacagagagagagagaagacagaagaaagagtgaagaaaaaatatcagattatatcacacatattgtttcatttcataaaatatttcttgtgtgattgtgtgtttgtgaatgtccacatacattatgagtttgtgtgggggctgcagcataaaacgtttttcttacgtggattgttgtaaccatcctgcgggatctctaacagccttgtcacatcagctttgtccgatcct

SEQ ID NO: 1464 - DNA, 321 bp, Homo sapiens
ctaaatcatggtcccctgcctttgtgagggcttcctggctacagatggcagctggctttctcaggggaaacttgggggtcatagagaaagctgaagaggggtgcttgcttctgtggatgacctcttcccacccagtgcagcgacactccccttttgtctakagctatccttagtcaagccagggctgcgggaccctaacccacacttccgctgtgtttctggatctctggtttgcaaggccagtggctctgtgggcaatacgtatgaaagaggactgctgttggaggaaagttccatttaggttgctggtgggaagttagt

SEQ ID NO: 1465 - DNA, 255 bp, Homo sapiens
ctaaatcatggtcccctgcctttgtgagggcttcctggctacagatggcagctggctttctcaggggaaacttgggggtcatagagaaagctgaagaggggtgcttgcttctgtggatgacctcttcccacccagtgcagcgacactccccttttgtctakagctatccttagtcaagccagggctgcgggaccctaacccacacttccgctgtgtttctggatctctggtttgcaaggccagtggctctgtggg

SEQ ID NO: 1466 - DNA, 21 bp, Homo sapiens
cccaggaaatgttcacaagaa

SEQ ID NO: 1467 - DNA, 20 bp, Homo sapiens
gccagaaggctagcaggatt

SEQ ID NO: 1468 - DNA, 260 bp, Homo sapiens
cccaggaaatgttcacaagaaagaaggacacaggtagcattcttccccgtgagctgataatctgccaagctggtaccacccatgagattctagtgtggcattttgtatcattaattacttttactgaaagtaattacttttactgaaagtaattaatgatgcaattcagagatattttaggggtgtgtgtgtgtgtgtgtgtgtatgtgtgtgtgtatcaaagttcaactttgtctccctaatcctgctagccttctggc

SEQ ID NO: 1469 - DNA, 20 bp, Homo sapiens
ccagacaagctctccatgtg

SEQ ID NO: 1470 - DNA, 20 bp, Homo sapiens
gccaggtaatctgagggaaa

SEQ ID NO: 1471 - DNA, 379 bp, Homo sapiens
ccagacaagctctccatgtgtgactcaatattgcacttcagtattaacatgcactgccacagttgccacagtaggggaagggaaaggtggatgggggagagagagaagaaagtaagaaagagagagagattgagcactgataattaagtccttccctcaaaaaatgatatacattccttctactctcctggccatgcagccactcctaacttccaggaggcaggaaggtaccacttcctccatgttctgaaggaaaggggaactggatattggtgaacacctgtaatgtttggcatgcacagctatacccagtgggcttgcaaatgtttccttcttccatattcacgcttgtatatacctttccctcagattacctggc

SEQ ID NO: 1472 - DNA, 20 bp, Homo sapiens
tatccctgatccttgcattt

SEQ ID NO: 1473 - DNA, 20 bp, Homo sapiens
gagctttgggcactaagaac

SEQ ID NO: 1474 - DNA, 166 bp, Homo sapiens
tatccctgatccttgcatttctccagcccccaccctcaggtcttgtaaagtccagattcttgactaagaagtcccaaataactttcaaactaagattttaaaacacaagtgaaggactcggtttggatcaagtttttgccaattgtgttcttagtgcccaaagctc

SEQ ID NO: 1475 - DNA, 600 bp, Homo sapiens
gaattccattaagaacattcgtgattcataggaggaggtcaaaatatcaacattaacaggagcttggaagaagctgatttccaccctcatgaatgacttcaagggttcaggtgcatgagtaaatgacagttccatcaacagactacaactttctgccctagttaacacagggcatctccatgtccccagttctccctatgggcatttttctctttgaaattccaaatcttttctgttctagaagcacgaaactacaagttctctctcaactcttcaaatgaggttggaacaaacagaatgggggcatgaacttttttccccataacttyaataaacaacagttttagcctcagtaggctttatgcaagccttcaacatctttttataggtatcttgacactcatgttctttttcttcttgcagcctatggaaattcctagagacagataaatgtgcaaacctgttcatcttgccaagaaaaatccgcttttctgccacagaaacaaaatattgggaaagagtcttgtggtgaaacacccatcgttctttgctaaaacatctggttgctactgtgtagactcagcttaagtcatggaattc

SEQ ID NO: 1476 - DNA, 600 bp, Homo sapiens; identical to SEQ ID NO: 1475

SEQ ID NO: 1477 - DNA, 20 bp, Homo sapiens
aggttgcccagagagatgaa

SEQ ID NO: 1478 - DNA, 22 bp, Homo sapiens
tgattgaacttccttggtcctt

SEQ ID NO: 1479 - DNA, 225 bp, Homo sapiens
aggttgcccagagagatgaaatgactggagagagagagaatctggtcgtctagaaaactgagttcagcccctggacttgctgctggggtctgaggtgaactttcctaaacgttgtgctgtggagtctcttccctcttgcgttcctcatacattaacttctcatggcagagatcggagctcatggttcacctgaggacactactaaggaccaaggaagttcaatca

SEQ ID NO: 1480 - DNA, 643 bp, Homo sapiens
gtcagatgagaaaggatttatttattgatgtatgtattttactagcagcactggcattagagtttctttgtcagtgagggttggagtgatgggttgattgaaatgaaggttgctgagatgacctggtgggtcctgctaacagcagatggatgtcaaaacatttgcattcagggrgagataaagtcaaaactgggacaaatcaactttctctcagctccagggctctaaggtcctttcttcgctctcagccttgttgggaaaagagaagaaccccctgccacatggtctctctggtgtgagaagctgacagtccactgctgagctttccctgctttgccacaaatagaggcacctccccacacaactccctctcctgctggaatgggaagagaggacactggctgttaagaagagctctggggatctcctgtcctggggcaaactcagtttctggagtcccctcttatagggctaaacccaggtgggctctgactgtttggggtccctgtgcctctcacagtcatgttttcagagttttgggagatctgggctggtttccctcttgccatggttcatgctggggtgtggccaacatggcagcatctcccctgccctcccagatttcaggttggagggagttcgg

SEQ ID NO: 1481 - DNA, 255 bp, Homo sapiens
gtcagatgagaaaggatttatttattgatgtatgtattttactagcagcactggcattagagtttctttgtcagtgagggttggagtgatgggttgattgaaatgaaggttgctgagatgacctggtgggtcctgctaacagcagatggatgtcaaaacatttgcattcagggrgagataaagtcaaaactgggacaaatcaactttctctcagctccagggctctaaggtcctttcttcgctctcagccttgtt

SEQ ID NO: 1482 - DNA, 20 bp, Homo sapiens
agctaggccaggctttcatt

SEQ ID NO: 1483 - DNA, 19 bp, Homo sapiens
caggcgtttcccaaagatg

SEQ ID NO: 1484 - DNA, 372 bp, Homo sapiens
agctaggccaggctttcattttacagatagggaaactgaggcctcagggcatatccaaagtgatctagggggcatagggagtccaggatttgcttgactatctcattcttcacaaggccactgttccccttttgggttgatattgtaattcattcattcattcattcattcattcagtttttactacctcctatgtgtcagatgcttctaggcactgctaattttgtttctttgaagtttctagaggtggaataaaacagacacatttctgtggactacattaaagaaggaaaggacttttccccccaaaatctaggtttggggaaagtctggtgacttttgtgagcctggggcatctttgggaaacgcctg

SEQ ID NO: 1485 - DNA, 20 bp, Homo sapiens
agctaggccaggctttcatt

SEQ ID NO: 1486 - DNA, 19 bp, Homo sapiens
caggcgtttcccaaagatg

SEQ ID NO: 1487 - DNA, 372 bp, Homo sapiens; identical to SEQ ID NO: 1484

SEQ ID NO: 1488 - DNA, 20 bp, Homo sapiens
tgcctgagggagtggtttag

SEQ ID NO: 1489 - DNA, 20 bp, Homo sapiens
gggctctgatggtttaggaa

SEQ ID NO: 1490 - DNA, 269 bp, Homo sapiens
tgcctgagggagtggtttagacggggacaagtagtgtgaaaacagagctagttagtaaatgcaagagctggggtttggaccccaatttttacagccaaaacaaaacaaacaaacaaacaaacaaagaccaatgcactttcctcctaagcacaatgcagtattttttccacatgcagttggaacccagaggaatccttaatgggcaactggggtagtgacataggacatatatgctcaaagtactgtgaattcctaaaccatcagagccc

SEQ ID NO: 1491 - DNA, 604 bp, Homo sapiens
tcatctagactgctgcagaccactctgcatggaagacctctgctcagaggatctcagcccactgcatggcccaccaagagcctctgacattcaggccgcttggttcttctggattcagttcttaggtccccgaaagtggtaaaggagagaggagaaaactagttcattttcagccargagtggcccctggcacacgggacactgcttgctttggacagaggccactcacaacaggcttccccttctgggtgtggtggccagcctgccctgacaacagtgcggcctgaatctgtgactcttagcggctgcttgggactgctgcaagactctttggtctgtgacttgcccaagagagaagtttctgggcagaacggggagctcaggaaagaagaaagttacatccgcacaaagtttcaattataaagcccaataataacgatgaccaaaacaaaacaaaaaacgaaacaaaatgaaaaagcctacatgctctttggtattgttgggactgaaaacaatggaactgagtttcttgactttttcttaaccttatccccatgaaagaggtttgaattacagtatttttcaaagtaaaagccatctgaac

SEQ ID NO: 1492 - DNA, 255 bp, Homo sapiens
tcatctagactgctgcagaccactctgcatggaagacctctgctcagaggatctcagcccactgcatggcccaccaagagcctctgacattcaggccgcttggttcttctggattcagttcttaggtccccgaaagtggtaaaggagagaggagaaaactagttcattttcagccargagtggcccctggcacacgggacactgcttgctttggacagaggccactcacaacaggcttccccttctgggtgtggt

SEQ ID NO: 1493 - DNA, 346 bp, Homo sapiens
aagaaaggtgggtggtgtcacagtaaggcaaatggaatctagggaaatatatgttaatagggatagagagatatataatgatataagaaaagataatattcatgaacctatatgcccctaaaaacataaccttgaaattcaaaacatgtaaagcaaaaactaagaraatgtaaaaatgtaaaattgtggtaaatttaaatttatttttacagaaatttattaaaaacataaaagatataaccacaaactgatatatcctttactcaaaatccaacaataggccaggcatggtggctcacacttataatcctagcactttgggaggccgaggcaggagaatcacttg

SEQ ID NO: 1494 - DNA, 255 bp, Homo sapiens
aagaaaggtgggtggtgtcacagtaaggcaaatggaatctagggaaatatatgttaatagggatagagagatatataatgatataagaaaagataatattcatgaacctatatgcccctaaaaacataaccttgaaattcaaaacatgtaaagcaaaaactaagaraatgtaaaaatgtaaaattgtggtaaatttaaatttatttttacagaaatttattaaaaacataaaagatataaccacaaactgatata

SEQ ID NO: 1495 - DNA, 20 bp, Homo sapiens
tgagcactaatgtgccaagg

SEQ ID NO: 1496 - DNA, 21 bp, Homo sapiens
caacttgctagtcccatgaac

SEQ ID NO: 1497 - DNA, 151 bp, Homo sapiens
tgagcactaatgtgccaagggtactagtaagtgctttatatatattattattgttattattattattattactctccccattttatagatgagaacattgaggcacagaaaggttaagtagcttgcctaagttcatgggactagcaagttg

SEQ ID NO: 1498 - DNA, 605 bp, Homo sapiens
gcagttgctctccacagggatcccccctttctccatgccatgcgaactggaaacccagtgcaatggattttctcactttgaccccagtgagggagggagatttttgataactgacaaagagcttttgttcaggtttgcaacaggatggatcagccagccccacctcatggccccatgcttcttccaggttcatcttccccttctgccccagaaaagcccccagccacagcctccttgcctccaagtcgccagcactccgccccctcctccgcctgcctctcagtctggaaaacagctttgcacgttaacctccaygggcattcactgggtttccagaggggtccccagccccacaggctgccaaaataggctctttacactccatagatgggagagaaaaatctgcttgttcggttgcaactgtcaagcaaaggacatgctgagctcagatagaaatagcagcagggtcagggcagggcaaggccccagcatttcattagctcggcccagctaagggtgattgaatgcacacagtggcccatgaatggggccatggagggcagccacacagtgcagcacagaaaaatcattctttggccgctgtc

SEQ ID NO: 1499 - DNA, 605 bp, Homo sapiens
gcagttgctctccacagggatcccccctttctccatgccatgcgaactggaaacccagtgcaatggattttctcactttgaccccagtgagggagggagatttttgataactgacaaagagcttttgttcaggtttgcaacaggatggatcagccagccccacctcatggccccatgcttcttccaggttcatcttccccttctgccccagaaaagcccccagccacagcctccttgcctccaagtcgccagcactccgccccctcctccgcctgcctctcagtctggaaaacagctttgcacgttaacctccasgggcattcactgggtttccagaggggtccccagccccacaggctgccaaaataggctctttacactccatagatgggagagaaaaatctgcttgttcggttgcaactgtcaagcaaaggacatgctgagctcagatagaaatagcagcagggtcagggcagggcaaggccccagcatttcattagctcggcccagctaagggtgattgaatgcacacagtggcccatgaatggggccatggagggcagccacacagtgcagcacagaaaaatcattctttggccgctgtc

SEQ ID NO: 1500 - DNA, 509 bp, Homo sapiens
ggataagggcatatctttgagcaccaggttccatgggcacatatctggttcattattctttgctttgcttgtgcaaaattattttcaaaggcaaagacacggggacaaagttgggctctytgaggctgttccttgagcaaagaggtgtatgcctctggctgcccacttggcagtggatatcttcatgcttcttttttccacccaaatattatggccactggagtatttgtaggaaacagtctaaaaaaagacaacactcacttccccttgcttcaggctcttcacagtcaactccactggcatgtttcaggcacctgctgtgtgccaggcattttttttcagaatggaacaatattgcccttgtctttaatgccttaactgtctagcaggaaagacattattatgagtacctggggcagaaacagtgtgagaaacattttggagacccaaaggaaggggccattgtaaagaagttccaccagagtagaggtaagaacggggagagggca

SEQ ID NO: 1501 - DNA, 255 bp, Homo sapiens
ggataagggcatatctttgagcaccaggttccatgggcacatatctggttcattattctttgctttgcttgtgcaaaattattttcaaaggcaaagacacggggacaaagttgggctctytgaggctgttccttgagcaaagaggtgtatgcctctggctgcccacttggcagtggatatcttcatgcttcttttttccacccaaatattatggccactggagtatttgtaggaaacagtctaaaaaaagacaac

SEQ ID NO: 1502 - DNA, 20 bp, Homo sapiens
tgggactgtcctcactctcc

SEQ ID NO: 1503 - DNA, 20 bp, Homo sapiens
tccctctcatttctcccaag

SEQ ID NO: 1504 - DNA, 377 bp, Homo sapiens
tgggactgtcctcactctcccgctgtggctcacttgcccccagggcccatcccagcccagcccagccctgcccagcccagcctgctgcatgcttctaccccggctcccactcaggctcgtgcgtcactgctattcatcttgtttagtgcttggcttggctgcagatgctgtaaatatggtaattttagactccctgattggaaaggattgcagagcgggttgtgggggaggacggcagtttgatttactccgcaggagctggttccgagatggctctccaccctctgtgcacgcctcttctccaagctgtgccccatcaggccctactcttagtgttgagtcctgacttcttggggtcttgggagaaatgagaggga

SEQ ID NO: 1505 - DNA, 656 bp, Homo sapiens
attacaggcatgagctaccgtgcccggccaaaaaaatattcttaagaagaacactagcacagtgactcactcataataggacatccgtatgtgctggttccttctctcttaccccttgttctgtgttaaatgttatgtgctcagcacatccatctttggaattaaagtatttctgggaaagataacacattaagccttaayatccagtccatgaagctgatatcacaggggaagaaacccacactggctcttaaggaagtgggtgagtcgtacatgaaacgcgccagagtgtccctgtctgtctaacggggtgggacacatgatcttggagggtatttccagtgctgcctatgattccacccagctatgaatcagggtgggcagaaactggaaacaggcatgtgggacccaggtggatcacagtctcccctcttccacctgctggcattcctgcctttggggacagcagggcgggtgaatcctgggctgtttgctcactgacagccatggggttgcaaaggatcccttctcttcagccggggcactgctgagttacttactcacccatcccaacattcatttattcagtagaaacatattagatgtccccagtgtgctcagtgctgagctgaataaaacagacaagaccctgattg

SEQ ID NO: 1506 - DNA, 255 bp, Homo sapiens
attacaggcatgagctaccgtgcccggccaaaaaaatattcttaagaagaacactagcacagtgactcactcataataggacatccgtatgtgctggttccttctctcttaccccttgttctgtgttaaatgttatgtgctcagcacatccatctttggaattaaagtatttctgggaaagataacacattaagccttaayatccagtccatgaagctgatatcacaggggaagaaacccacactggctcttaag

SEQ ID NO: 1507 - DNA, 20 bp, Homo sapiens
tccttgggtgactccgtatc

SEQ ID NO: 1508 - DNA, 27 bp, Homo sapiens
tgacactacatgagtacaaattacagg

SEQ ID NO: 1509 - DNA, 372 bp, Homo sapiens
tccttgggtgactccgtatctgtgtgtaagtatatgcctgtgatttgtattcatatagtgtcatatacacacaaatacctatatatttacatgtatatatatataaatatgtatatgacatttactaatacatatctctaataggtatttgtaatatatataaaaatacctgtgatttgtattgatatagtgttatatatatgtgtgcatatatatatatacacacaaaaaaacctgtccatatatatgtgtctatagagacaaatacctataaaatagtaggtaattacctatctatacttataatagatatttttaataaatatacaaatatctgtacaaacacctgtaatttgtactcatgtagtgtca

SEQ ID NO: 1510 - DNA, 912 bp, Homo sapiens
tgcagaaaggaaatggacttatgcagaggcccatacagcccccagtcaaccctgcctttgccatgtcagctgtgggggattttgtgctggtctcagcctctgagcgctctctgcctcagtttccctytgcagggtggagccagcacccacagccatgttttggcacgtggcaaactaactccttttgtgtactgtgcagtcttaggagtaatgaggcagcaatattattgttagttctctgttctaatgatcagctgtgaggacctaagcaaatgagagttgctatagtgttatgaagaaaagaccctgacttgttagagtggccatttgtttccccacagctattcatccccctggtgccctcatcaccagggcatatctaaaagatgccatgctagatacccatccagggtatggtacagacatcacaaggtaagtattccaaggccagagaagtgaaaatgttcacagcagctctggaagagaggaactcagaaacctctgggcaccttctggatggagcccattgcctccacatccaaacatggaccatgtattgctacaaaggaagcaatagtgtgctccacggaaggcccgggctgctgccggtccctccagagttcacggctgggcatgatgagaccaacctctctcaccctggccgcttctctagccagtgggagggcagaggctggcagaaaagcctccgtctgccttgttgactctgccgggttcagagagggcttcacatttgacttggcgaaggagagaagttctttatttccctcagcctcaggtctgccaagcccaaggctgaggtgagcagttttctcctccgtctctcattgccacatcattacctgcagagttcaatgaaaagccccatccagaatgggccaagccgagcctgca

SEQ ID NO: 1511 - DNA, 255 bp, Homo sapiens
tgcagaaaggaaatggacttatgcagaggcccatacagcccccagtcaaccctgcctttgccatgtcagctgtgggggattttgtgctggtctcagcctctgagcgctctctgcctcagtttccctytgcagggtggagccagcacccacagccatgttttggcacgtggcaaactaactccttttgtgtactgtgcagtcttaggagtaatgaggcagcaatattattgttagttctctgttctaatgatcagc

SEQ ID NO: 1512 - DNA, 20 bp, Homo sapiens
ctgggtgaacacagcctctc

SEQ ID NO: 1513 - DNA, 20 bp, Homo sapiens
ggatccacatcaaggactgg

SEQ ID NO: 1514 - DNA, 247 bp, Homo sapiens
ctgggtgaacacagcctctcccctcactgagccagattccagcctccggccataggtgaaagacaatttccgattattgttttcaaacattctacatccagcgcataaaaacacaatagtgacaggaaaaatacacacacacacatacacacacacacaccccacatgcacacaacacaaaggtttaagcgctcactataagaaggtcaggggacccttttctcattccagtccttgatgtggatcc

SEQ ID NO: 1515 - DNA, 20 bp, Homo sapiens
aaaggctctgaggacatcca

SEQ ID NO: 1516 - DNA, 20 bp, Homo sapiens
cagcctggttgtttcacctt

SEQ ID NO: 1517 - DNA, 358 bp, Homo sapiens
aaaggctctgaggacatccaggggtcttgggctcaaaggctggagcgccacacacacacacacacacacacatgcacacacacacacatgcacacacacacacatcaaatcacatattagctcgtgtcttcatgagctttccagtttgcaaaccgctcacacatacagcatttcctttaaacttcacatcagccagtgaaggggctttgtaagcctgacatgtaagatctaacaaccctcccagaatgatagaattggcagaggggggaggcagagactgtcaagcaatggcaagttttctgattggctggaacacagggcaggtgaccccgtgagctaaggtgaaacaaccaggctg

SEQ ID NO: 1518 - DNA, 20 bp, Homo sapiens
ggtgttggatggctgttttt

SEQ ID NO: 1519 - DNA, 20 bp, Homo sapiens
cggctgctcactctcatttt

SEQ ID NO: 1520 - DNA, 129 bp, Homo sapiens
ggtgttggatggctgttttttgtttgtttgtttgtttgttttttgagaatctccttggctcaggtcctcacctgagagccagataatcacgtttgttaaaagaagagaaaaaatgagagtgagcagccg

SEQ ID NO: 1521 - DNA, 21 bp, Homo sapiens
tgagtggatgaagtctcagga

SEQ ID NO: 1522 - DNA, 20 bp, Homo sapiens
cctcagcttgctggagtagg

SEQ ID NO: 1523 - DNA, 369 bp, Homo sapiens
tgagtggatgaagtctcaggactcccctcaggagcctaaggttctgggaggctccagaccaccatccaacctatatctgttcctgggccaccaagggggcaggccttccattcagcccgcagatgaagactttagcttcactttggtgctcagttccctctacagagcccggcaaacaagagcatgcagcacatgagtatgggctgagcttgagcttttgttctcattgactgctgtgtgtgtgggggtgtgggtgtgggtgtcagtgtgtgtatgtgtgtgtgtgtgtgtgtgtgtgtgctcactcacatgttgaaggaactccattgctctcctctccacccccacccctactccagcaagctgagg

SEQ ID NO: 1524 - DNA, 20 bp, Homo sapiens
tggtcactgcatggtgttct

SEQ ID NO: 1525 - DNA, 20 bp, Homo sapiens
ccaccattctccctgatttg

SEQ ID NO: 1526 - DNA, 388 bp, Homo sapiens
tggtcactgcatggtgttctcaatcacaagccatgagccagggttcaacatgctcccttcacttcagaccttcctcacaactgagcctggatcccactctggacctcatgatccgcctaccacggcctcccagcgcgcccagcccctgctttatttttctatatagcacttattgttaccagatacatttgtgtttatcacctctctcatcacacacacacacacacacacagttaaaggcagggacttggtctattttctcaaagttgtgtccccggcacttagaatcctgcctgccgtggtgtacatgctcaataagtacttattaagtgaatgaatggagtcagacatgtcctcaagggtaggttcaaatcagggagaatggtgg

SEQ ID NO: 1527 - DNA, 20 bp, Homo sapiens
cctgatgggtctgatgctct

SEQ ID NO: 1528 - DNA, 20 bp, Homo sapiens
agatccttgttgcagctggt

SEQ ID NO: 1529 - DNA, 156 bp, Homo sapiens
cctgatgggtctgatgctcttcttccctgggcctctgcacctttccagagccaggccccctgtgtgtgtgtggccggtggcgtgggggagttgcttcttttcatttttgtgagtgaaaatgaaagggttccccacaaccagctgcaacaaggatct

SEQ ID NO: 1530 - DNA, 20 bp, Homo sapiens
ggaattgatgctttccatga

SEQ ID NO: 1531 - DNA, 20 bp, Homo sapiens
gggtgcatacgcttacaaca

SEQ ID NO: 1532 - DNA, 246 bp, Homo sapiens
ggaattgatgctttccatgaatgaaagctcctaaaccccctcccctgcagctagggctgatggggaatggctaaaccccagatgtcttcattgcaccataaatgtgagcagggaggtacaaaggggtatgcaatgatgtgtgtgtgtgtgtgtgtgtgtgtgtgtgtgtgtgtgtgtgtatcaaagagaggagtctgtcacaggaaaaatactgagtggccccaaatgttgtaagcgtatgcaccc

SEQ ID NO: 1533 - DNA, 20 bp, Homo sapiens
tgagcagggaggtacaaagg

SEQ ID NO: 1534 - DNA, 20 bp, Homo sapiens
tcgatgtagtggtcgcttct

SEQ ID NO: 1535 - DNA, 426 bp, Homo sapiens
tgagcagggaggtacaaaggggtatgcaatgatgtgtgtgtgtgtgtgtgtgtgtgtgtgtgtgtgtgtgtgtgtatcaaagagaggagtctgtcacaggaaaaatactgagtggccccaaatgttgtaagcgtatgcaccccagttttacaataataacaatcataatactaataattttgctatcatttgttgagatctttttctgggccaggtacggtactttgcacatattatctcataattctcaaaatctctgtgaggtagaagtatcactatgcaacttttcaaatgggaaagcaagcatggaaaaaaagttggttcaattgccaaagatcatagatctgagaagtggcagggccaggattagaatgctagagctcaaagttcttctgccacgtatcatagaagcgaccactacatcga

SEQ ID NO: 1536 - DNA, 20 bp, Homo sapiens
tgagcagggaggtacaaagg

SEQ ID NO: 1537 - DNA, 20 bp, Homo sapiens
gggtgcatacgcttacaaca

SEQ ID NO: 1538 - DNA, 142 bp, Homo sapiens
tgagcagggaggtacaaaggggtatgcaatgatgtgtgtgtgtgtgtgtgtgtgtgtgtgtgtgtgtgtgtgtgtatcaaagagaggagtctgtcacaggaaaaatactgagtggccccaaatgttgtaagcgtatgcaccc

SEQ ID NO: 1539 - DNA, 20 bp, Homo sapiens
atggcagtctcggtctgatt

SEQ ID NO: 1540 - DNA, 20 bp, Homo sapiens
tggttcatggacacacaagg

SEQ ID NO: 1541 - DNA, 268 bp, Homo sapiens
atggcagtctcggtctgattttaaatctaaattctcaagtacaagtagcttcccaagaagagaaagctacttctacataaagaggtggtatcagtaggaactccttaagccttacctttttattattgatgatgatgaagtgaagcttcctgttgatatcattgtcagaccaagcacagcacaccaactcaaacctcattcattcattcattcattcatgtgtccttttaacagacgtctactagacaccttgtgtgtccatgaacca

SEQ ID NO: 1542 - DNA, 20 bp, Homo sapiens
ttgcacagcctgaagcataa

SEQ ID NO: 1543 - DNA, 20 bp, Homo sapiens
cagcaaatgctgagaccaaa

SEQ ID NO: 1544 - DNA, 588 bp, Homo sapiens
  misc_feature 393: n = A,T,C or G
cctctgccattgggacccctggcatttccttcctttcatggcctgataaaacccaagctctgagagttagcaaactgataccctttaatcatgccttatatttataaaggcctttgtccagagaactccaagtgctcaaaaatgtcaattaattcactctcccagcctcctttagggaaaagctggtggcaggtgtcatcatcatcaccagaggtggccaaatcatcttcttagtgggctgtcctggatattctttgtgtttaaagagcattttgcttctgagcacatggttgggttttgcacagcctgaagcataagaattgaggtatttccttactttacagctctagagaattcttgtgtgtgggtacccgtgaaacacaaactgagtgncatgctttcttgagtttggaaattttgttattgtttggtctcagcatttgctggtagtaaataagtaagcagaagtaagctgcttaagttcccatgtagtccaagacagagcagacaaaagacctgatccccaagccccacacctggccccaagatccctctgggattatcttgcggccactctctgaagccttg

SEQ ID NO: 1545 - DNA, 19 bp, Homo sapiens
ctgtcccaggcctcctcta

SEQ ID NO: 1546 - DNA, 19 bp, Homo sapiens
gaaacggtggcacagacag

SEQ ID NO: 1547 - DNA, 395 bp, Homo sapiens
ctgtcccaggcctcctctagcccctggtgtgcttgggcgtgcacctccatctgcacatgtgctctctctctcttctcataaggacagtagtcagattggacgaagggcctaccccactcctgtgtcttaactaattacatctacagcgaccctatttccaaataaggtcacgttctgaggctctggaaaggacatgaatttggggggacactatccaacacagtacagccttcctgcccccctgcaaagtttcgtcttgctctccacccgcccctaacctctgcaccctttctttagctgggggtgggcttctggaatgcagtctcattcgcccactagtctaagtgtggttggtaggtagagggtaggggacacgctgtctgtgccaccgtttc

SEQ ID NO: 1548 - DNA, 20 bp, Homo sapiens
ccaatttctctcctgcctca

SEQ ID NO: 1549 - DNA, 20 bp, Homo sapiens
gcctgcagggttacacaact

SEQ ID NO: 1550 - DNA, 144 bp, Homo sapiens
ccaatttctctcctgcctcattttcccttaaaatactgttcattccctattataaccacatctgaatgtatatgtgtgtgtgtgtgtgtgtgtgtgtgtgtgtgtgtgtgtgtgtcatctccctagttgtgtaaccctgcaggc

SEQ ID NO: 1551 - DNA, 21 bp, Homo sapiens
gccatcaaggaatacaagtgg

SEQ ID NO: 1552 - DNA, 20 bp, Homo sapiens
ctctgaccagggctgagttc

SEQ ID NO: 1553 - DNA, 429 bp, Homo sapiens
gccatcaaggaatacaagtggccaaaggacaaatattgtgtgattccacttacatgaggtacctagaggagtcaaattcacagagacagaaagtagagtggtgattaccagaggttggggtggagagaggggaacggggagttaatgttttatggatacaaagtttctgtttttcaagatgaagaagttgtggagatagataatggtgatggctggacatcagtgagaatgtacttaacacccctaaacagtacagttaaaaatggttacagtgataaattttatgttacgtatatttgaccataaaaaggaaggaaaaaaggaaagaaggaaggaagggagggaaggaaggagggagaggggaagggaggaagggggagggagagagggaggaaggaaatgcaagtgggaactcagccctggtcagag

SEQ ID NO: 1554 - DNA, 19 bp, Homo sapiens
atgcaagtgggaactcagc

SEQ ID NO: 1555 - DNA, 20 bp, Homo sapiens
atgtggtttgtgggtccatt

SEQ ID NO: 1556 - DNA, 132 bp, Homo sapiens
atgcaagtgggaactcagccctggtcagagcactgctgggaaaagataggtgactctttatcttgctgtaaagagaggtgtgtttgtgtgtgtgtgtccctgcaggagtgaaaatggacccacaaaccacat

SEQ ID NO: 1557 - DNA, 21 bp, Homo sapiens
gactcagtaccaaagcctcca

SEQ ID NO: 1558 - DNA, 20 bp, Homo sapiens
tgcaagaggaagggtaagga

SEQ ID NO: 1559 - DNA, 140 bp, Homo sapiens
gactcagtaccaaagcctccagggccactaccccggggttagcctctctctctctccctttccttccaggagtctttccaagatctgaggtaagattgatgcttctctgggaatcagacctccttacccttcctcttgca

SEQ ID NO: 1560 - DNA, 481 bp, Homo sapiens
tgtacactgctgggggccccactttccaatgtttacttctgagattggaagaagaagacaagaaacacctcctcaccccctaccctctgcctccacgcccgcgactcagcccaggtgacccaaacggcagagtcaacttggcgcaaccggagcgtccccatcgcgccggccacccccagcccccttcgcccctcgcttggccccacaatgcgccgttgtgccgygcctgccgtcaggccggggatttggagcagggatggggggaatattcgtcagatatttaaaacagagccgagagaacaaagcaggcctttgtgcagcagggcggcccgggagctgggagccgccggcccccaagcactgtgctgggccaggagagtgcgcatgcgcgcggcgacctgtgcgctcgggttctgtgccggcttttaccccaggtaagcggggcgctgcgttaaccccttcccatcccgcgccccggggc

SEQ ID NO: 1561 - DNA, 255 bp, Homo sapiens
tgtacactgctgggggccccactttccaatgtttacttctgagattggaagaagaagacaagaaacacctcctcaccccctaccctctgcctccacgcccgcgactcagcccaggtgacccaaacggcagagtcaacttggcgcaaccggagcgtccccatcgcgccggccacccccagcccccttcgcccctcgcttggccccacaatgcgccgttgtgccgygcctgccgtcaggccggggatttggagcagg

SEQ ID NO: 1562 - DNA, 558 bp, Homo sapiens
tctctacctttaaagaagaaaatgggaaagagaggtgggttttggggttcttattttgcaaaccccctggagacaatgcaaaaactcctcctctgcagcagcaggtaaacacctgagctgggaaggaaagctacctggtagtcccaatgaatgccagcaagacaagggcagggaagaggcggggcagcttctctgtcagctgaaggcttacttttgtttgaacaatgtcccaacctcaggagggagggacaaaaccaagaatggtgtgatttyccctgggggccactgctaaaatgaagttgggcatcgtgtggggctggaagctgtggctgcaggaagccaggggtgatggccttcctgcagccgtctctcgagccccgaacttgcgggaagaaaggactgcccccttccaacccgttcgggttggtttgcgctggaacgccacgcttttcaaagtgtctgagtgataggtactttctaaatatgtacagcgatggcctgataagcaactaagcgtctggcttcgcgggttcatgcccgaggctgtgcggtcggggg

SEQ ID NO: 1563 - DNA, 558 bp, Homo sapiens; identical to SEQ ID NO: 1562

SEQ ID NO: 1564 - DNA, 21 bp, Homo sapiens
ggcaaggagacaattgtggta

SEQ ID NO: 1565 - DNA, 20 bp, Homo sapiens
gaggcagaaggtgaggtttg

SEQ ID NO: 1566 - DNA, 262 bp, Homo sapiens
ggcaaggagacaattgtggtagtcaagacaggatgtgaataagacataaagaagcgtttcatcagtggggatggaaaagaaccagggctgtggcggccgagttcaggagtaggaagggtcggtcaggcgttcatgaggacctcttcacatacacacacacacaaacacacacacttgcacacacaggcagcctgctgggaccattcatttagaggcccccacagcacattttagcacaactgcaaacctcaccttctgcctc

SEQ ID NO: 1567 - DNA, 22 bp, Homo sapiens
ccctctgaagcttaacgaagaa

SEQ ID NO: 1568 - DNA, 20 bp, Homo sapiens
cccaagtcaggcaaagttga

SEQ ID NO: 1569 - DNA, 145 bp, Homo sapiens
ccctctgaagcttaacgaagaatttttaaactagtgggacaaagctcaataatggtaaaagcacacaaacacacacacacacacacacacacacacacacacacacacagggaaaaacaagttattcaactttgcctgacttggg

SEQ ID NO: 1570 - DNA, 22 bp, Homo sapiens
ccctctgaagcttaacgaagaa

SEQ ID NO: 1571 - DNA, 20 bp, Homo sapiens
cccaagtcaggcaaagttga

SEQ ID NO: 1572 - DNA, 145 bp, Homo sapiens; identical to SEQ ID NO: 1569

SEQ ID NO: 1573 - DNA, 20 bp, Homo sapiens
ggctaggtgagtgggttgtg

SEQ ID NO: 1574 - DNA, 20 bp, Homo sapiens
cccttgttcctgcattgaga

SEQ ID NO: 1575 - DNA, 145 bp, Homo sapiens
ggctaggtgagtgggttgtgccaggaggcaaatggtgagtgtgtgtgtgtgtgtgtgtgtatgtgtgtgcgccagctagctgcccccactctcaggagcccggtgctgatggtgatctctctctctctcaatgcaggaacaaggg

SEQ ID NO: 1576 - DNA, 20 bp, Homo sapiens
gggttgaggttgcagtgagt

SEQ ID NO: 1577 - DNA, 20 bp, Homo sapiens
agatacaggggcagtggaga

SEQ ID NO: 1578 - DNA, 197 bp, Homo sapiens
gggttgaggttgcagtgagttgagatctagccactgtgctccagcctgggtgacagagtgagactccatctcaaaaacaaagagagagagagagagagagagagatgggtgggacaaggtcaagatatttatttatcctcctggttctactgtaatgggcccttgcttggctgtgtctctccactgcccctgtatct

SEQ ID NO: 1579 - DNA, 20 bp, Homo sapiens
aagacatttgcccacagctt

SEQ ID NO: 1580 - DNA, 20 bp, Homo sapiens
aaatcccagggctctgctac

SEQ ID NO: 1581 - DNA, 238 bp, Homo sapiens
aagacatttgcccacagcttgaaccatggctttgggaagactctttgttctttcttccccattattttgggttttctggtctttattccgtgcttgtcaaattccaggcatgcaaggctttcaaacacactatcaaacccgccacttacacacacacacacacacacacacacacacacactccccacccccattgcattcccatcacaatcacatttgtagcagagccctgggattt

SEQ ID NO: 1582 - DNA, 20 bp, Homo sapiens
ctgctcatctctgctggaaa

SEQ ID NO: 1583 - DNA, 20 bp, Homo sapiens
gccttggacttcttcctcct

SEQ ID NO: 1584 - DNA, 382 bp, Homo sapiens
ctgctcatctctgctggaaatgctactagccaaggcgagccaagccaaacagctgtttgtgggctcacagaccctccaaggataagggtctcttctgtgatgaccagattgcaccctgatgccagccagctcctggcgtctgctgctggcccccccaagatggtagcctggggagatacagcccaaacgcctgatccagtctcttcccagtctagctctgttggcaaaatgaaactccctgccaagggaaagccagtttggactgtccaaggggcacccatgataactgggcaaaccatccatcctgggttggtccgtgtgctttgagacttacactaggtgggccagttgaggaaggagataggaggaagaagtccaaggc

SEQ ID NO: 1585 - DNA, 20 bp, Homo sapiens
cactttaggcccaagtccaa

SEQ ID NO: 1586 - DNA, 23 bp, Homo sapiens
tgtgtacagtatgtgcatgtgtg

SEQ ID NO: 1587 - DNA, 404 bp, Homo sapiens
cactttaggcccaagtccaacatttagaagctatcaacacaggaaaaaagttgtacctgttttcacgctgagaaaagcagatagctaatctgtaccaggaaaacaaacaagaaaaatgatctgaaaataacttggaaggttttgttttcaccaaaggaagcataaatagtgaaacacatacacataagacatgcatgtacacacatatatatacatgcacacacatacacacattgtatgcacacatatacataaacacacatacataaacacactgtacacacaaatatatacatgcacacacatacacacacatactgtatgcaaacatgtatacatgcacacacgtacacatactgtatgcacacatatatacatgtacacacatgcacatactgtacaca

SEQ ID NO: 1588 - DNA, 24 bp, Homo sapiens
actgtacacaggtatacgcacact

SEQ ID NO: 1589 - DNA, 22 bp, Homo sapiens
ttctggaaggaacacaataaca

SEQ ID NO: 1590 - DNA, 300 bp, Homo sapiens
actgtacacaggtatacgcacacttgcatatatatacatgcatacacacatacacacacatatacaatactgtacacacatatatacacacatactgtatacacatatacatcacatacacacatatacatacatatatacgtgtacacacatatgtatacacacgtacacactatatacacatatatgcacacatttacgtatatacttacatatacacacgtgttttcctcctaattacaaaaataaatacagaaaaacactactagaaaacaacatgttattgtgttccttccagaa

SEQ ID NO: 1591 - DNA, 22 bp, Homo sapiens
atgtaagtacacggtgggaggt

SEQ ID NO: 1592 - DNA, 23 bp, Homo sapiens
aaggtaaagtagtttgcccaagg

SEQ ID NO: 1593 - DNA, 330 bp, Homo sapiens
atgtaagtacacggtgggaggtgcaaaggcttcccgagcaccaggtcctttgcacctatcatctccttaaactaaccctcactgcaaacttatgatctaggctttatcctccccattttgtaagtttaaacaaacaaacaaacaaacaaacaaacaaaaaaccccaggcttaaaaaggtaaagtaacattaccaacattacataaatgtcaaggttgagtttttaaccaaagtatgtctgacccacaagtctgtggtagttctgttcccatctagtcccagggcagccatttatgcagaaacagtaaccttgggcaaactactttacctt

SEQ ID NO: 1594 - DNA, 20 bp, Homo sapiens
taagtacacggtgggaggtg

SEQ ID NO: 1595 - DNA, 20 bp, Homo sapiens
gaaactgaggcagtggaagg

SEQ ID NO: 1596 - DNA, 343 bp, Homo sapiens
taagtacacggtgggaggtgcaaaggcttcccgagcaccaggtcctttgcacctatcatctccttaaactaaccctcactgcaaacttatgatctaggctttatcctccccattttgtaagtttaaacaaacaaacaaacaaacaaacaaacaaaaaaccccaggcttaaaaaggtaaagtaacattaccaacattacataaatgtcaaggttgagtttttaaccaaagtatgtctgacccacaagtctgtggtagttctgttcccatctagtcccagggcagccatttatgcagaaacagtaaccttgggcaaactactttaccttccactgcctcagtttc

SEQ ID NO: 1597 - DNA, 20 bp, Homo sapiens
taagtacacggtgggaggtg

SEQ ID NO: 1598 - DNA, 20 bp, Homo sapiens
cctgggactagatgggaaca

SEQ ID NO: 1599 - DNA, 279 bp, Homo sapiens
taagtacacggtgggaggtgcaaaggcttcccgagcaccaggtcctttgcacctatcatctccttaaactaaccctcactgcaaacttatgatctaggctttatcctccccattttgtaagtttaaacaaacaaacaaacaaacaaacaaacaaaaaaccccaggcttaaaaaggtaaagtaacattaccaacattacataaatgtcaaggttgagtttttaaccaaagtatgtctgacccacaagtctgtggtagttctgttcccatctagtcccagg

SEQ ID NO: 1600 - DNA, 20 bp, Homo sapiens
ctagatgcctgcaatgtgga

SEQ ID NO: 1601 - DNA, 22 bp, Homo sapiens
ttgcagtgtgtgggtttatttc

SEQ ID NO: 1602 - DNA, 249 bp, Homo sapiens
ctagatgcctgcaatgtggaggtcctgagaattcaatacagaataatacaaatgcagttcttcctgtgaagcctggacaacctttcccttccttccttccttctttccttccttccttccttccttccttccttccttccttctttcttgagtttcctgatgccagctcctcagatggtgagccagcggtgggaaggtagtggtgggggtgattataaatacaataagaaataaacccacacactgcaa

SEQ ID NO: 1603 - DNA, 20 bp, Homo sapiens
ctagatgcctgcaatgtgga

SEQ ID NO: 1604 - DNA, 20 bp, Homo sapiens
aaattccagatgcccttgtg

SEQ ID NO: 1605 - DNA, 356 bp, Homo sapiens
ctagatgcctgcaatgtggaggtcctgagaattcaatacagaataatacaaatgcagttcttcctgtgaagcctggacaacctttcccttccttccttccttctttccttccttccttccttccttccttccttccttccttctttcttgagtttcctgatgccagctcctcagatggtgagccagcggtgggaaggtagtggtgggggtgattataaatacaataagaaataaacccacacactgcaaaactccatgttaatactattaatagtatttccaaattgcatacaggtagaagacagttccttagcaacatgatcgtaatgagaattccacaagggcatctggaattt

SEQ ID NO: 1606 - DNA, 20 bp, Homo sapiens
agccgagtgcagtagaggaa

SEQ ID NO: 1607 - DNA, 20 bp, Homo sapiens
ggaagggagtgtcagaacca

SEQ ID NO: 1608 - DNA, 307 bp, Homo sapiens
agccgagtgcagtagaggaaaatgtgcctgcaagtaatgagaaagcattttgcaaagacagccttggctttagggttgagaagaatgcagcagtttctggcacaggcctaccctgtagctccccctgggtgtgtgtgtatgtgtgcgtgtgtgtgtgtgtgtgtatctggacacaggatcctatgcatgcatgtgcacatacacacaccccaccaccaccacagatttttttcccagcaacatctcacacaacctaagtttgaccctcacttgctttgaccaggagttggttctgacactcccttcc

SEQ ID NO: 1609 - DNA, 20 bp, Homo sapiens
acctgctgaggagtgcagtt

SEQ ID NO: 1610 - DNA, 20 bp, Homo sapiens
ggttctggctcagtggtttc

SEQ ID NO: 1611 - DNA, 956 bp, Homo sapiens
  misc_feature 494: n = A,T,C or G
gcagtcgggaatggagctcaggaggttggccagcccctgctgctttagcttgatgacgtgctccagcactgtggaggttcaaagtgaggggggagtaaagcacagagcaagccccctcctcctggccaccccaagggcaggagagcaaggaggaggcatcagagatgactgcaaagtgggcagcagatctgagggccactgggccctgctgagggtcctctgtccccacctccccacatcccccagggaggtgggaagtgacagccccccaacttctagagggtcgccctccattacgccaagttaaagaagcctaaaagcaagtgatttctgtgatttctttagtttgcctccttgcctgagacctgctgaggagtgcagttgtaggtgagttgttctgacaccggaaaggcttcaggagaccagggtggacccctgaggccctgctcggtcccaggcaggccagggtctgagtggaagtcacaagtggaggnagctcctccagaggacatgggctcctgattccatgaggagggggtagggagaggtgctggggggctcaggaagcacccctgtcccaggctaccaagctgatcctgagtgtttgtgtctgaaaccactgagccagaacccatgccaggcaaaggccagcccaacagcatagtaaatatgttccccggaatttagcactcctgagtcagaggggagcaggggctggcaaggaccctctcctctggcctgtctgaaatgggaggaccaagctctagagaatcaagtttttactttctcaactcctatcctctactccctacctgcctccccattcctctgcaaataaaagacagagcaggggtggacaggcagcagcccaaccatcccgccactcatccgctcatccctgcccgcagctcacaggctggctggcagcagctgtgtcaggaggcaggacccacatt

SEQ ID NO: 1612 - DNA, 2001 bp, Homo sapiens
acctaagtttgaccctcacttgctttgaccaggagttggttctgacactcccttccctccctgccaaccgccctccatcttttctctcctgtcttcctctctgtggaccccacaccctgcaattcctcctttcccccatcacttccttctctctggggccttgggttgacggtatctccccttggccagcccctttttcgtaatgccacttggctctgctttcaagcaggcaccttgtgaacccgactcccaccctcctttccaaagcccacctcccttgcagtcgggaatggagctcaggaggttggccagcccctgctgctttagcttgatgacgtgctccagcactgtggaggttcaaagtgaggggggagtaaagcacagagcaagccccctcctcctggccaccccaagggcaggagagcaaggaggaggcatcagagatgactgcaaagtgggcagcagatctgagggccactgggccctgctgagggtcctctgtccccacctccccacatcccccagggaggtgggaagtgacagccccccaacttctagagggtcgccctccattacgccaagttaaagaagcctaaaagcaagtgatttctgtgatttctttagtttgcctccttgcctgagacctgctgaggagtgcagttgtaggtgagttgttctgacaccggaaaggcttcaggagaccagggtggacccctgaggccctgctcggtcccaggcaggccagggtctgagtggaagtcacaagtggaggagctcctccagaggacatgggctcctgattccatgaggagggggtagggagaggtgctggggggctcaggaagcacccctgtcccaggctaccaagctgatcctgagtgtttgtgtctgaaaccactgagccagaacccatgccaggcaaaggccagcccaacagcatagtaaatatgttccccggaatttagcactcctgagtcagaggggagcaggggctggcaagaaccctctcctctggcctgtctgaaatgggaggaccaagctctagagaatcaagtttttactttctcaactcctatcctctactccctacctgcctccccattcctctgcaaataaaagacagagcaggggtggacaggcagcagcccaaccatcccgccactcatccgctcatccctgcccgcagctcacaggctggctggcagcagctgtgtcaggaggcaggacccacattcggaaactctgaggaatctccttggagagtagttactggggccgcttgtcccagaccccgaattggaacaccgtctctgacaactccaagactgggacttgtcacttgcgggaataacagtgggaaccaccctggaaaatccaggatgcagggtccccttactagcacaaagcagccttggggcccctgtgcccccacacccagcccttcctcccttctgggagcggaacgcgggagaaagccttgcatcctcagtggccccccaccctctgaaaggcatgtagtggcctcaaggccttattcccccctccactctgttatatggagcctatgaggagcagatgtttctaatgaagggcccaggccagggctctggaggtaacaggcccgccatagagcgctggctcccatggaggggccgcagcccccagacctctgaaagcacaagccgcccagtgaatgggacacacactctcttgaattctcagctcctttcaggaaattgccaagttagcccttggctttctcctttccagtgcccgccccgtttccatggcaaccgcctccccatcttccagagcctctctccggtcctgcccgccccctcctctccaccaccctccgcgtctcatctgtctgggtgggaaccgggattagagttcatcgggccgggatgcttttcccagggccgctttgccttcgtgatccctttgcggcagcccggcccctgccccgggcttttcaagtcccccagacttaatgaccag

SEQ ID NO: 1613 - DNA, 2001 bp, Homo sapiens
aagctctagagaatcaagtttttactttctcaactcctatcctctactccctacctgcctccccattcctctgcaaataaaagacagagcaggggtggacaggcagcagcccaaccatcccgccactcatccgctcatccctgcccgcagctcacaggctggctggcagcagctgtgtcaggaggcaggacccacattcggaaactctgaggaatctccttggagagtagttactggggccgcttgtcccagaccccgaattggaacaccgtctctgacaactccaagactgggacttgtcacttgcgggaataacagtgggaaccaccctggaaaatccaggatgcagggtccccttactagcacaaagcagccttggggcccctgtgcccccacacccagcccttcctcccttctgggagcggaacgcgggagaaagccttgcatcctcagtggccccccaccctctgaaaggcatgtagtggcctcaaggccttattcccccctccactctgttatatggagcctatgaggagcagatgtttctaatgaagggcccaggccagggctctggaggtaacaggcccgccatagagcgctggctcccatggaggggccgcagcccccagacctctgaaagcacaagccgcccagtgaatgggacacacactctcttgaattctcagctcctttcaggaaattgccaagttagcccttggctttctcctttccagtgcccgccccgtttccatggcaaccgcctccccatcttccagagcctctctccggtcctgcccgccccctcctctccaccaccctccgcgtctcatctgtctgggtgggaaccgggattagagttcatcgggccgggatgcttttcccagggccgctttgccttcgtgatccctttgcggcagcccggcccctgccccgggcttttcaagtcccccagacttaatgaccagccctgggtttcctcctcttctctttctctgcctccaataaagccggagaattaacccaggttttaagtgccccggttccaagctgaatatcaaagggggcttccccaagctgcttctgcatttcaaaggggctgatttatcactttcacttaaaccggcacattttggggaaagagttttacccagaggtcaaactctggaaaaacaaatggatccccgttcaccccctcctggggtgctgtgggctattagtgtataaactgctggcgggtaggtgggaaacaggctacccgcactcctcatcagcctgggcccaaactgttcctgtgcccccggggcgattgtgaggaagagggggaaatgcatggaaccatggctgagaagctcccacactgctcctcctggtctctgtgcctggcaccgggcaagtcgtcagctctgtttctgcttcctgggcctcttgtggaggccctaacctgaacctgcattaacacttccaagctaagggtgctccctgccccagggactctgccccttcaatacagccagggcctgtgagtccagattctgccttttcttccattctgcctgcgaagcttttgcaggcacttactattcaggggctgcagagctgggcccctgagccaccctcactccccagctctctcctgccctcacagtcaggccttgtccatacccttctttcccacattccctccccacaaaacatgcacacacacattcacccaccctctcccagacccctgccgccgcccccagtctccctctcatccaacctcaacccaataaattatctctattattgccccttcctcaaggacttcctcatacccccacaaagaatgctggaaccccggaccctggaaacttttctccctctctgtgaagcatctgtctagctgcccccaagcagactccagcctcactgcagagcgtgaggtccttcgtctgatttagcccagatctgattgattcccaggctttctcaggcattaacccccaaggagagatgtgc

SEQ ID NO: 1614 - DNA, 20 bp, Homo sapiens
ttcctaggcatgggactttg

SEQ ID NO: 1615 - DNA, 20 bp, Homo sapiens
tgtggatggcaggttattga

SEQ ID NO: 1616 - DNA, 141 bp, Homo sapiens
ttcctaggcatgggactttgaaagccacagaaggaaatggaagacaaaagaaagagcagagcaggggagccaatggtcccctgagtcttcatgtttatgaggctacttgggacctaggagttcaataacctgccatccaca

SEQ ID NO: 1617 - DNA, 20 bp, Homo sapiens
agactggctccaagggaagt

SEQ ID NO: 1618 - DNA, 20 bp, Homo sapiens
gtgcaccctgagaagtgtga

SEQ ID NO: 1619 - DNA, 259 bp, Homo sapiens
agactggctccaagggaagtaaacaacagaatccaaggctaaaattgtatccttaataaatactatctgaagttaaaacaggagttcactatttatggaaatctacataaacctaataagcacagagtggtgaatgtgcgtgcgtgtgtgcgtgtgtgcgtgtgtgtgtgcattcagggagggagtggaatagaacaagatgtggcactcactctcttcctccctgtcccttcctgtggtcacacttctcagggtgcac

SEQ ID NO: 1620 - DNA, 401 bp, Homo sapiens
gttattctgatctcgcttcctcgaagatgggatctttgtcttattgacacctcagtaggtgttccacaaatggttgtccacagagtgaatgaatggatggcctttgcctaggctcatactgataccccaggctgcctctccctgatgtattctgtagggggcactctcacttctgccttcgccgcagccaccactggagawgtaggcacctgtgtctccatcctgggcagcgctggtcttggctttacttatctcctggatctggtgttttgaacctgacaaaaggcaggcatgtgggtacattaaagcacaaacaatgtgcagtacgtttatttgctggatgaccattccagccattccaaagtcccacttgagtggggcattacaggaacatcctccgt

SEQ ID NO: 1621 - DNA, 255 bp, Homo sapiens
gttattctgatctcgcttcctcgaagatgggatctttgtcttattgacacctcagtaggtgttccacaaatggttgtccacagagtgaatgaatggatggcctttgcctaggctcatactgataccccaggctgcctctccctgatgtattctgtagggggcactctcacttctgccttcgccgcagccaccactggagawgtaggcacctgtgtctccatcctgggcagcgctggtcttggctttacttatctc

SEQ ID NO: 1622 - DNA, 591 bp, Homo sapiens
gggctgggacaggaagatgcctctccactttttacctgtgtttcagtatcccaggcagggcaagcagatgggggaaggcaggtggcctcccacctgctgtcctcacgtgaacatatggtctgaggttgatgggaccaatgatctggtctgaggcccgggaccaaagctcttaacgtgtatggaactgatttcttattgctggagaataagagctgaagatttaggtgctgtaggaggtgggtcttgggcagtccartctgaggctcaaagaggttttgtgcattgttgaaaagcaggaaacagggaaaaggaaaacatccttggttctgggtttacaatggacttcctagctgcggtagttggatctcagaagaggaggtagaggtctgaagggagaggctgcttgcacagtcaggcgggagaactcaagcagggtggaatgagatagagaagacagttgaagaagaagaaccagggctcagatttctagacggaggatgttcctgtaatgccccactcaagtgggactttggaatggctggaatggtcatccagcaaataaacgtactgcacattgtttgtgctttaatg

SEQ ID NO: 1623 - DNA, 591 bp, Homo sapiens; identical to SEQ ID NO: 1622

SEQ ID NO: 1624 - DNA, 597 bp, Homo sapiens
ccactgggagtgcatctgagggtcagcacaagacaatgaagcagagacaccttcagaccccaagtcctggctttggcggcctttgagaattgcagaaggagcccactgggaatatatgtgttataggagtcctttgacaattaaatgaaatcatggacataaagtacctggcactttgagaagctgttcaaactgatatcyactctctttattcccaacccatgccctttccctgttttgtcattttccattgaagaattctgaaatttttcggattctaaattctgacaatttaccgttcattctctgtcttcttaatgaggtgtaaatacatacagtaaggtctaataatcttcttttaataacagctttattgaagtattcacataccataaaattcaccctttaaaagtatacaattcacaggtttttataatactatattcacagagaaatctcatcactacttaatttaagaacattttcctcgcccccccccaaaaaaaaaaaaaaaaaaaaaccctcactctccatttcaccctctccagcccctggcaaccattaatctactttctgtcactattctgagcatctcat

SEQ ID NO: 1625 - DNA, 255 bp, Homo sapiens
ccactgggagtgcatctgagggtcagcacaagacaatgaagcagagacaccttcagaccccaagtcctggctttggcggcctttgagaattgcagaaggagcccactgggaatatatgtgttataggagtcctttgacaattaaatgaaatcatggacataaagtacctggcactttgagaagctgttcaaactgatatcyactctctttattcccaacccatgccctttccctgttttgtcattttccattgaa

SEQ ID NO: 1626 - DNA, 20 bp, Homo sapiens
cttccctccaccatcctctc

SEQ ID NO: 1627 - DNA, 22 bp, Homo sapiens
ggaagcacattcacaatggata

SEQ ID NO: 1628 - DNA, 234 bp, Homo sapiens
cttccctccaccatcctctcaattgttttactggatttttatctggctaacaaaaacaaacaggcaaaaaacaaaaaccacaacacatacacacacacacacacacacacacacacacatacacacacacacatacatcacatcacatgaaacagaaaaaggcaagatttagactccatatagcaaatggatttatgctacggcgtggcttttatccattgtgaatgtgcttcc

SEQ ID NO: 1629 - DNA, 20 bp, Homo sapiens
cttccctccaccatcctctc

SEQ ID NO: 1630 - DNA, 22 bp, Homo sapiens
ggaagcacattcacaatggata

SEQ ID NO: 1631 - DNA, 234 bp, Homo sapiens; identical to SEQ ID NO: 1628

SEQ ID NO: 1632 - DNA, 21 bp, Homo sapiens
tgagtgaaaggcagacatcaa

SEQ ID NO: 1633 - DNA, 20 bp, Homo sapiens
ggcctgtttcctgatctcaa

SEQ ID NO: 1634 - DNA, 309 bp, Homo sapiens
tgagtgaaaggcagacatcaaagtcttcctggatgaggtcaagagcagcctgggtagtgtagcaagaccctgtctataccaaaaactttaaaaggcatatctgtggtcctagctagcctgtggaggctgaggctggagattgctgaagcctgggaggttgagaggctacagtgagctgtgattgcgccaacggacggcagcctgggcaacagagtgagaccctatctcaacaaacaaacaaacaaacaaacaaatcaaaaaaatgttcccagatatttgagaatggaatttgagatcaggaaacaggcc

SEQ ID NO: 1635 - DNA, 20 bp, Homo sapiens
agggcctcacaatcagacac

SEQ ID NO: 1636 - DNA, 20 bp, Homo sapiens
ggagccaaagggagagagtt

SEQ ID NO: 1637 - DNA, 385 bp, Homo sapiens
agggcctcacaatcagacacattcatgatgctgcagtgaccatgtcaacttttacttggagggacttcagactgcaaatagcctctccagttcagatcagattttgctgctaaatgagatttggcaccaaattgacaaaatgaagaaacaaacaacaacaacagcaaaaacaaacaaacaaacaacccttttcgtccctgggatctttgggtttcaggcttgcagatagggaattatgagtttgtgttagtattattcctatttacacaactagattttcctgtcacctagaacacagaatggactcaatgactccttcctaggaagtcctgactccagaggtcttccagactctcctccaccctaactctctccctttggctcc

SEQ ID NO: 1638 - DNA, 20 bp, Homo sapiens
agggcctcacaatcagacac

SEQ ID NO: 1639 - DNA, 20 bp, Homo sapiens
ggagccaaagggagagagtt

SEQ ID NO: 1640 - DNA, 385 bp, Homo sapiens; identical to SEQ ID NO: 1637

SEQ ID NO: 1641 - DNA, 20 bp, Homo sapiens
caggcaccccatataagcac

SEQ ID NO: 1642 - DNA, 19 bp, Homo sapiens
aacccactgagctctggga

SEQ ID NO: 1643 - DNA, 375 bp, Homo sapiens
  misc_feature 163, 167, 168, 169: n = A,T,C or G
cttaggcaaggccagctacttccaccgtctccccgctccccaccactggataaggagttgattttctctaaacatttcatacaggcaccccatataagcactatttacagggcactcagagaatcagaaaaactgatgaggcccaggacatagatagataganagannnatagatagatagataactagagaactgtttcaagggcaccaagtgtgattacatgttcaaacctgtctttgtttatttttccccctctcacatgaaaagaaagacagatgtgtaccttctctatgagttggtgcaacgtctgggttcaggtagaaaatcctaggcccccttgaatacactcccagagctcagtgggttcgactact

SEQ ID NO: 1644 - DNA, 20 bp, Homo sapiens
cagggcactcagagaatcag

SEQ ID NO: 1645 - DNA, 20 bp, Homo sapiens
acacttggtgcccttgaaac

SEQ ID NO: 1646 - DNA, 120 bp, Homo sapiens
cagggcactcagagaatcagaaaaactgatgaggcccaggacatagatagatagatagatagatagatagatagatagatagatagataactagagaactgtttcaagggcaccaagtgt

SEQ ID NO: 1647 - DNA, 21 bp, Homo sapiens
gagggtttgagaatgggaact

SEQ ID NO: 1648 - DNA, 20 bp, Homo sapiens
aactgagattgtgccactgc

SEQ ID NO: 1649 - DNA, 188 bp, Homo sapiens
gagggtttgagaatgggaacttttactttttattcttctatatcaaatttataaattttcatatatgaagcatatgtcaatttcaaaataaaggtggggttttttgtttttttgtttgtttgtttgtttgtttgagttggagtctcactctgtagcccaggctggagtgcagtggcacaatctcagtt

SEQ ID NO: 1650 - DNA, 609 bp, Homo sapiens
agaaatctgtttgcagccttaattcatctgtaaaccaggcaagtcctacccgccttcctaacagaaggagcaaatgagaattaattagtaaatgtggctgtcaaacttggtccgtgttattattaacttaatgtgtttgtttaaaagggggaggctggcttgctccagtctacaggcaggcgtgtgagctgctagcctgccggccaggtctgatgaaaaatcctgtagattgtttccacatgggagtttacaacacagataattagttgcagtggtggaaggccttggaggcgagggatgatggattctgatgatggattttgcagtccttggggggcagaggtgttctctaagggaggagttgttgtactagggagaaggcgccccaggggcttaggcaacacagcctgaagccagcaggcagggtgaccaagggggtggcccctgctgtcccagatggttggggaggcgtggggagtgctgcacacaggccatgcatgtatgcatgtattcctggagcgtgcaggtgtctggggctttctcacaggcagatctaccgtgctgctccagaagataccagatgctcagccaacccactgcatgcaccag

SEQ ID NO: 1651 - DNA, 20 bp, Homo sapiens
ctttcctccctagccagctt

SEQ ID NO: 1652 - DNA, 20 bp, Homo sapiens
aatgcaaccctcctgtccta

SEQ ID NO: 1653 - DNA, 330 bp, Homo sapiens
ctttcctccctagccagcttctcctcccccggaggtggctcaggctccctgggtcactgcttcccgccagctggagaagggaggcagcagctatcttaacaacctaagtcaaggccgagtctctgattgtctgtgccggggaggctccctcctccatccttccctccctccctccctggctccctagggatggggtcacggatgtgtttatcttgttggaggaggtagggagggatggtgggccccagtctgtaagtcagttgaagggtacagagtgaccactagggtcctaggctttagctttgacatctaggacaggagggttgcatt

SEQ ID NO: 1654 - DNA, 21 bp, Homo sapiens
ctcaagactcttcccttgtga

SEQ ID NO: 1655 - DNA, 23 bp, Homo sapiens
tgaacaactgtcttgagatggag

SEQ ID NO: 1656 - DNA, 428 bp, Homo sapiens
ctcaagactcttcccttgtgaagcttatattgtattttgggtttttttgttttgttttgctttttttgtttgtttgtttgtttgtttggagagacagggtcttgttctgtcacccaggctggagtgcagtgctacgatcatagttcactgcagcctcccttcctgggctcaagcaatcctcccacctcagcctcctgagtagctaggactataggcatgcaccaccgtgcctagctaattttttaaaaattgttttgtagagacagggtctcattatgttttccagggtggtctcaaactcctcggctcaagcagtcttcccacctcagcttcccaaagtgttgagattacaggcgtgagccaccatgcctagccattatattttattcttacatttgtttataactccatctcaagacagttgttca

SEQ ID NO: 1657 - DNA, 20 bp, Homo sapiens
ctccctcttcatgcgctaat

SEQ ID NO: 1658 - DNA, 20 bp, Homo sapiens
gagaacctgggcagactcct

SEQ ID NO: 1659 - DNA, 146 bp, Homo sapiens
ctccctcttcatgcgctaataaatgtgaaagccctttgtaaactgtgaaacatcactgaaatgtagagtagtgctgtggtggttgtgatgatgatgatgatgatgatttactctcccttttgccccaggagtctgcccaggttctc

SEQ ID NO: 1660 - DNA, 20 bp, Homo sapiens
ctccctcttcatgcgctaat

SEQ ID NO: 1661 - DNA, 20 bp, Homo sapiens
gagaacctgggcagactcct

SEQ ID NO: 1662 - DNA, 146 bp, Homo sapiens; identical to SEQ ID NO: 1659

SEQ ID NO: 1663 - DNA, 20 bp, Homo sapiens
tcagggctgttgtaaatcca

SEQ ID NO: 1664 - DNA, 20 bp, Homo sapiens
gtgcctggtcctttgtgagt

SEQ ID NO: 1665 - DNA, 388 bp, Homo sapiens
tcagggctgttgtaaatccaaataccataatgtcagtgttcaccagcaggttgctggaaccagctgtgtgaccttgggcaagcttcttaaccagcatatgcttcaggtcttgcccatctgtaaaatgagaccattgtgaagataataggatatatatatatatgtaaagaacctagccagggtagactgggtgaggtggctcacacctgtaatcccagcactttgggaggccaaggtgggtggatcgcttgaacccagagtttgaaaccagccctggcaacatagggataccctgtctctaaaaaagaaataataaaataaaataataaaaaagaacctggccagggtgggaccagggtgacagcggcactcacaaaggaccaggcac

SEQ ID NO: 1666 - DNA, 20 bp, Homo sapiens
atctcgcagaggtcattgct

SEQ ID NO: 1667 - DNA, 21 bp, Homo sapiens
cagcagcttctccacttatgc

SEQ ID NO: 1668 - DNA, 389 bp, Homo sapiens
atctcgcagaggtcattgctttcttaaagatgatcaaggctggacacggtggctcatgcctgtaatcccagcactttgagagtccaaggtgggtggatcacctgaggtcaggagttcgagaccagcctggccaacatggtaaaacgccgactctactaaaaatacaaaaattagccaggcgtggtggtggacgcctgtaattccagctactcaggaggctgaggcaggagaaccacttgaacctggaaggcagaggttgtagtgagctgagattgtgccattgcactccagcctgggcaacagagaaagactctatctccaaaacaaacaaacaaacaaacaaaggaaaggacaacgtttaacagaaagcataagtggagaagctgctg

SEQ ID NO: 1669 - DNA, 20 bp, Homo sapiens
gggcctctaggaacctaacc

SEQ ID NO: 1670 - DNA, 20 bp, Homo sapiens
cagcccttcttaggactgga

SEQ ID NO: 1671 - DNA, 248 bp, Homo sapiens
gggcctctaggaacctaaccagcgtcaccatgagaggggaagttagaaaggtgtctgccacatgctcaggtatgcctgcagggaatgagctcaaggtgaatgattaaatgtcttttttgcttttactccgaaaggaagatcacatgccaccaccaaccaccaccaccaccacctccacacacacacaaagttcatttcctccttaagggacaagaggcctaggtttactccagtcctaagaagggctg

SEQ ID NO: 1672 - DNA, 22 bp, Homo sapiens
tggtcactaccgtcgctttcta

SEQ ID NO: 1673 - DNA, 22 bp, Homo sapiens
gtgccaagtgctaggtcctctt

SEQ ID NO: 1674 - DNA, 1091 bp, Homo sapiens
gacgtgtctttttcctttttttccacagttttaatatattattcttcaacgacattttttgtaactttacacttttttggttattttattttaaaaaaatgaaaaattaatttaaaaaaatgcaaaaaactgttggattatttattttagaaattcccccctttgtgttggactgcaaattgagtttctttctctttaggcctttcacaactaggactgagaatgtatgtaaaagttctgtgacagtacagaaggaaaacaactttttatgtatagcttctaaaaggggaaaaaaaaaaaaagagaaaccctttgacttccacgtgcccatctcaagacattccactcacagatttgaggttctggattccaggtctggagttttccaatgttaatgtaaacagaactggcacacacacattaagatgaatgtaattattattcctcttgctggtcactaccgtcgctttctatttctctttctttgtgtgaatttatttaaaagaaaaaaaaactttttgtaacgactatttgcagtttaaaaatcaataaaccccgttttttcaagaaacattgatggtggagctggttttacttggttttggtttgactttgccagtaaggttctccccttgtataccttgcaagtcctgggtagggggaggcggagagagagggctgtggctgtgggtggcggcatctctcatccctataagctaagcctatagctcccttccttgatgctggcagtttgctgcgcttagaggggacggggtggaggttttctgcaaaggagcctgtacttcctgctgtattacttctgaaaagactgtgcagtgtgttagttgttggctgaatagcagcgggcccagccttgccgacacttgtgtggcctctgcggttcttctggggagccaaggctcagggccttccagtccgccccgtccagcctgtgctcttcattcctttggatggtgtttggggtgccaaaatgataaaagaggacctagcacttggcacacttgcaggcttggatttgagtgagttcttttattggggtgccttgggctcattttgcccataagaaagaa

SEQ ID NO: 1675 - DNA, 684 bp, Homo sapiens
tttggtttgactttgccagtaaggttctccccttgtataccttgcaagtcctgggtagggggaggcggagagagagggctgtggctgtgggtggcggcatctctcatccctataagctaagcctatagctcccttccttgatgctggcagtttgctgcgcttagaggggacggggtggaggttttctgcaaaggagcctgtacttcctgctgtattacttctgaaaagactgtgcagtgtgttagttgttggctgaatagcagcgggcccagccttgccgacacttgtgtggcctctgcggttcttctggggagccaaggctcagggccttccagtccgccccgtccagcctgtgctcttcattcmtttggatggtgtttggggtgccaaaatgataaaagaggacctagcacttggcacacttgcaggcttggatttgagtgagttcttttattggggtgccttgggctcattttgcccataagaaagaaatttacctcagtactggcctctcaacacctacccgtgtggggagggtataaggaagcactgcctgcttggagaggaatgtccagcggggtgaggggctcagtcacaaggaactgggaactgggactggatttgacatagccttttgggtttggagggctgttaaggggaagtgagtgttaacactggccaaca

SEQ ID NO: 1676 - DNA, 22 bp, Homo sapiens
tggtcactaccgtcgctttcta

SEQ ID NO: 1677 - DNA, 22 bp, Homo sapiens
gtgccaagtgctaggtcctctt

SEQ ID NO: 1678 - DNA, 569 bp, Homo sapiens
tggtcactaccgtcgctttctatttctctttctttgtgtgaatttatttaaaagaaaaaaaaactttttgtaacgactatttgcagtttaaaaatcaataaaccccgttttttcaagaaacattgatggtggagctggttttacttggttttggtttgactttgccagtaaggttctccccttgtataccttgcaagtcctgggtagggggaggcggagagagagggctgtggctgtgggtggcggcatctctcatccctataagctaagcctatagctcccttccttgatgctggcagtttgctgcrcttagaggggacggggtggaggttttctgcaaaggagcctgtacttcctgctgtattacttctgaaaagactgtgcagtgtgttagttgttggctgaatagcagcgggcccagccttgccgacacttgtgtggcctctgcggttcttctggggagccaaggctcagggccttccagtccgccccgtccagcctgtgctcttcattcctttggatggtgtttggggtgccaaaatgataaaagaggacctagcacttggcac

SEQ ID NO: 1679 - DNA, 22 bp, Homo sapiens
tggtcactaccgtcgctttcta

SEQ ID NO: 1680 - DNA, 22 bp, Homo sapiens
gtgccaagtgctaggtcctctt

SEQ ID NO: 1681 - DNA, 569 bp, Homo sapiens
tggtcactaccgtcgctttctatttctctttctttgtgtgaatttatttaaaagaaaaaaaaactttttgtaacgactatttgcagtttaaaaatcaataaaccccgttttttcaagaaacattgatggtggagctggttttacttggttttggtttgactttgccagtaaggttctccccttgtataccttgcaagtcctgggtagggggaggcggagagagagggctgtggctgtgggtggmggcatctctcatccctataagctaagcctatagctcccttccttgatgctggcagtttgctgcgcttagaggggacggggtggaggttttctgcaaaggagcctgtacttcctgctgtattacttctgaaaagactgtgcagtgtgttagttgttggctgaatagcagcgggcccagccttgccgacacttgtgtggcctctgcggttcttctggggagccaaggctcagggccttccagtccgccccgtccagcctgtgctcttcattcctttggatggtgtttggggtgccaaaatgataaaagaggacctagcacttggcac

SEQ ID NO: 1682 - DNA, 798 bp, Homo sapiens
acttccacgtgcccatctcaagacattccactcacagatttgaggttctggattccaggtctggagttttccaatgttaatgtaaacagaactggcacacacacattaagatgaatgtaattattattcctcttgctggtcactaccgtcgctttctatttctctttctttgtgtgaatttatttaaaagaaaaaaaaactttttgtaacgactatttgcagtttaaaaatcaataaaccccgttttttcaagaaacattgatggtggagctggttttacttggttttggtttgactttgccagtaaggttctccccttgtataccttgcaagtcctgggkagggggaggcggagagagagggctgtggctgtgggtggcggcatctctcatccctataagctaagcctatagctcccttccttgatgctggcagtttgctgcgcttagaggggacggggtggaggttttctgcaaaggagcctgtacttcctgctgtattacttctgaaaagactgtgcagtgtgttagttgttggctgaatagcagcgggcccagccttgccgacacttgtgtggcctctgcggttcttctggggagccaaggctcagggccttccagtccgccccgtccagcctgtgctcttcattcctttggatggtgtttggggtgccaaaatgataaaagaggacctagcacttggcacacttgcaggcttggatttgagtgagttcttttattggggtgccttgggctcattttgcccataagaaagaaatttacctcagtactggcctct

SEQ ID NO: 1683 - DNA, 22 bp, Homo sapiens
ttggtgctaaagttccccagtt

SEQ ID NO: 1684 - DNA, 22 bp, Homo sapiens
tcaatttgcagtccaacacaaa

SEQ ID NO: 1685 - DNA, 1400 bp, Homo sapiens
accttccctcatttcagtctcccgcacacttattcctcctcccctcttcccggtggcacctctccacctgtacccgcccccccaccccccccacccctgccccttggaagagttgttgccagaccagggttttgggggaaacctgtcttgacattcaaaacctttttcttcccgatctgaacccctgttgactaatcttgcctgggtttgtgtaggtctgcaggaaggaaggctgaaaaagcggacgaagattttgacttaagtgggactttgtgatttaattttttcttttttttaagtggggaggaaggggaagctagatggactaggagagacttgattttggtgctaaagttccccagttcatatgtgacatctttttaaaaaaaataacaacaaaaaaaaaatgagagaaaagctaaaaaaaaaaaagtaaggggtgagcagttaatggtattcattccacatacaatatctgtgtaaaacgatttcctgtagaagtagctttaatggtttttgctctagaataccgtaggtctatccttagagcactcacgccatgctttcttccctgggttttaaacttcatataactttcagaaattggagagcaaaaattttgcttgtcactgcacatcaatataaaaaagcttatttaacttatcaaaacgtatttattgccaaactatgcttttttttgttaattttgttcatatttatcgggatgacaaatccatagaatatattcttttatgttaaattatgatcttcatattaatcttaaaattttgtgacgtgtctttttcctttttttccacagttttaatatattattcttcaacgacattttttgtaactttacacttttttggttattttattttaaaaaaatgaaaaattaatttaaaaaaatgcaaaaaactgttggattatttattttagaaattcccccctttgtgttggactgcaaattgagtttctttctctttaggcctttcacaactaggactgagaatgtatgtaaaagttctgtgacagtacagaaggaaaacaactttttatgtatagcttctaaaaggggaaaaaaaaaaaaagagaaaccctttgacttccacgtgcccatctcaagacattccactcacagatttgaggttctggattccaggtctggagttttccaatgttaatgtaaacagaactggcacacacacattaagatgaatgtaattattattcctcttgctggtcactaccgtcgctttctatttctctttctttgtgtgaatttatttaaaagaaaaaaaaactttttgtaacgactatttgcagtttaaaaatcaataaaccccgttttttcaagaaacattgatggtggagctggttttacttggttttggttt

SEQ ID NO: 1686 - DNA, 21 bp, Homo sapiens
cattacctcttcagcgccaga

SEQ ID NO: 1687 - DNA, 22 bp, Homo sapiens
ccattaactgctcaccccttac

SEQ ID NO: 1688 - DNA, 660 bp, Homo sapiens
gaaaaagcagtaacagtttacagaagcaacttagtgccttgtaatctaactttgtcactgtgactacattacctcttcagcgccagagggcacccgtgggcctcccggagcctctgcccatggcggggtggagacccggaaccagcagccccctccactggcgacacaactgcaccttccctcatttcagtctcccgcacacttattcctcctcccctcttcccggtggcacctctccacctgtacccgcccccccaccccccccacccctgccccttggaagagttgttgccagaccagggttttgggggaaacctgtcttgacattcaaaacctttttcttcccgatctgaacccctgttgactaatcttgcctgggtttgtgtaggtctgcaggaaggaaggctgaaaaagcggacgaagattttgacttaagtgggactttgtgatttaattttttcttttttttaagtggggaggaaggggaagctagatggactaggagagacttgattttggtgctaaagttccccagttcatatgtgacatctttttaaaaaaaataacaacaaaaaaaaaatgagagaaaagctaaaaaaaaaaaagtaaggggtgagcagttaatggtattcattccacatacaatatctgtgtaaaacg

SEQ ID NO: 1689 - DNA, 21 bp, Homo sapiens
gccttaagtgccaaatcacaa

SEQ ID NO: 1690 - DNA, 22 bp, Homo sapiens
tgtcacatatgaactggggaac

SEQ ID NO: 1691 - DNA, 22 bp, Homo sapiens
ccgaccttggacaactcaagac

SEQ ID NO: 1692 - DNA, 18 bp, Homo sapiens
ctgctggttccgggtctc

SEQ ID NO: 1693 - DNA, 660 bp, Homo sapiens
cagccctcaggattctctctcggaccaggagggctacctgagcagctccagcagcagccacagtggctcagactccccgaccttggacaactcaagacgcctgcccatcttcagcagactttccatctcagatgactaagccagggtagggagggacctcctgcctactccagcccctaccctgcacccacatcccataccctcttctccctacccatcccattccccacaggccctacattaacaaggttaagctcaacccctttcccccagcacctcagaatgtgccctccctctccccctcataaccccacctaacataaggacaagtcaatttgtcagtagcttcttctggcttgaaaccccctccctggattttatagcccacttaccatgcataacagacaagtcccatattttgtcagtagatgcctttttttttccggcttaagccttaagtgccaaatcacaagagaaaaagcagtaacagtttacagaagcaacttagtgccttgtaatctaactttgtcactgtgactacattacctcttcagcgccagagggcacccgtgggcctcccggagcctctgcccatggcggggtggagacccggaaccagcagccccctccactggcgacacaactgcaccttccctcatt

SEQ ID NO: 1694 - DNA, 20 bp, Homo sapiens
gctgccacttcatccacaac

SEQ ID NO: 1695 - DNA, 22 bp, Homo sapiens
tccctaccctggcttagtcatc

SEQ ID NO: 1696 - DNA, 660 bp, Homo sapiens
cctgacccgccaccccaagtacaagacggagctgtgccgcaccttccacaccatcggcttttgcccctacgggccccgctgccacttcatccacaacgctgaagagcgccgtgccctggccggggcccgggacctctccgctgaccgtccccgcctccagcatagctttagctttgctgggtttcccagtgccgctgccaccgccgctgccaccgggctgctggacagccccacgtccatcaccccaccccctattctgagcgccgatgacctcctgggctcacctaccctgcccgatggcaccaataacccttttgccttctccagccaggagctggcaagcctctttgcccctagcatggggctgcccgggggtggctccccgaccaccttcctcttccggcccatgtccgagtcccctcacatgtttgactctccccccagccctcaggattctctctcggaccaggagggctacctgagcagctccagcagcagccacagtggctcagactccccgaccttggacaactcaagacgcctgcccatcttcagcagactttccatctcagatgactaagccagggtagggagggacctcctgcctactccagcccctaccctgcacccacatcccataccctcttctccctacccatc

SEQ ID NO: 1697 - DNA, 22 bp, Homo sapiens
tctccagggtaacaagatgctc

SEQ ID NO: 1698 - DNA, 19 bp, Homo sapiens
gacggtcagcggagaggtc

SEQ ID NO: 1699 - DNA, 660 bp, Homo sapiens
gtttgtgattgtgtagggggctgcccatagtggacatcctggtggatgtcctctgtccttaccatcctttctcttctctctccagggtaacaagatgctcaactatagtgctcccagtgcagggggttgcctgctggacagaaaggcagtgggcacccctgctggtgggggcttccctcggaggcactcagtcaccctgcccagctccaagttccaccagaaccagctcctcagcagcctcaagggtgagccagcccccgctctgagctcgcgagacagccgcttccgagaccgctccttctcggaagggggcgagcggctgctgcccacccagaagcagcccgggggcggccaggtcaactccagccgctacaagacggagctgtgccgcccctttgaggaaaacggtgcctgtaagtacggggacaagtgccagttcgcacacggcatccacgagctccgcagcctgacccgccaccccaagtacaagacggagctgtgccgcaccttccacaccatcggcttttgcccctacgggccccgctgccacttcatccacaacgctgaagagcgccgtgccctggccggggcccgggacctctccgctgaccgtccccgcctccagcatagctttagctttgctgggtttcccagtgccgc

SEQ ID NO: 1700 - DNA, 22 bp, Homo sapiens
gagactgattggaaggggacct

SEQ ID NO: 1701 - DNA, 21 bp, Homo sapiens
cactgcctttctgtccagcag

SEQ ID NO: 1702 - DNA, 660 bp, Homo sapiens
caaaggaagggaacacttctgaaggaggaagttgagagtcttaggccaggtcttgaaggagggggtatcaattaagcagagactgattggaaggggacctaacgtagcctatgatagactcctttctgaggtttacctgtttttgtcgcgggcggtggcgggggcggggtgcggtaatctagagaggtctgggttgtgtgagatattttgagttgaagaatctatttgactagtaaaaaagttgaactttaaagtggtagctttggggacagaggacatgggggttgcattgcaggagtcagcatggagcagggtgcttgtcacacagtttggatcttgtggtttcttacgcatggggccaaaataaacccaggtgaatggcctatgggagggagagagggaagggagcttgctagagccgaggtagagatgagttctttgagaaagagcgggcgtttgtgattgtgtagggggctgcccatagtggacatcctggtggatgtcctctgtccttaccatcctttctcttctctctccagggtaacaagatgctcaactatagtgctcccagtgcagggggttgcctgctggacagaaaggcagtgggcacccctgctggtgggggcttccctcggaggcactcagtcaccctgcccagct

SEQ ID NO: 1703 - DNA, 22 bp, Homo sapiens
attggaacagaaacctgccatt

SEQ ID NO: 1704 - DNA, 21 bp, Homo sapiens
ccgcgacaaaaacaggtaaac

SEQ ID NO: 1705 - DNA, 660 bp, Homo sapiens
gggaactaactcctaggtccctgacctgcaccatttccaaatcttgggtacaatttgggcaggtgaccagggtcctattggaacagaaacctgccattggtggctctgcccccatccccaccacccccaatccgctattgactaggaggtgggtaggggggttggtgctttccttttcctttccatctgcagctttgcgttaaagattaaacactggagctcttatccaagcttgctcttgcagccaaaagactaattgcaaaggcatcttctcagtgaagggggcggggtgggctagggctgagtggaaatggtgagagagattattgtagaaaatatctcttccgggaacttagggcaaagagttttattttcaggaatcacatccctgtctcccccaacctcagaccaggcccccaatctcctccccacaagaaaaagcaaaggcagtctgaaaacctgttgccaaaggaagggaacacttctgaaggaggaagttgagagtcttaggccaggtcttgaaggagggggtatcaattaagcagagactgattggaaggggacctaacgtagcctatgatagactcctttctgaggtttacctgtttttgtcgcgggcggtggcgggggcggggtgcggtaatctagagaggtctgggt

SEQ ID NO: 1706 - DNA, 513 bp, Homo sapiens
ctctgcccccatccccaccacccccaatccgctattgactaggaggtgggtaggggggttggtgctttccttttcctttccatctgcagctttgcgttaaagattaaacactggagctcttatccaagcttgctcttgcagccaaaagactaattgcaaaggcatcttctcagtgaagggggcggggtgggctagggctgagtggaaatggtgagagagattattgtagaaaatatctcttccgggaacttagrgcaaagagttttattttcaggaatcacatccctgtctcccccaacctcagaccaggcccccaatctcctccccacaagaaaaagcaaaggcagtctgaaaacctgttgccaaaggaagggaacacttctgaaggaggaagttgagagtcttaggccaggtcttgaaggagggggtatcaattaagcagagactgattggaaggggacctaacgtagcctatgatagactcctttctgaggtttacctgtttttgtcgcg

SEQ ID NO: 1707 - DNA, 22 bp, Homo sapiens
ggctgattcaactccagtgtca

SEQ ID NO: 1708 - DNA, 22 bp, Homo sapiens
ttgaaactcaaagggtgggaag

SEQ ID NO: 1709 - DNA, 1663 bp, Homo sapiens
cccgccagaccatgtcctcctggggaaaaagtttccctagtccccccagcagcgcgccccaccctacgccccgctggaaaaaaaacagcaacataaaatcctaggcttgaacattctgtgcgtcccaaatttctaatgtcctcggcctgcccggtttgccgaagggagccgagtgtcgaagagaagtcgggaaaaggtaagttgtgcagacacttggggaagtttcaaggagaccgccagctcaagatggaaaccgcggcccgggcgctaaggacgggcttcagctcccgctggcaaaaagagaaagtcgagcccgccttcctgcccaacaaaaaacaacaacatgacaacaagaaccccggagggagtggaatgagtgacgtcacagccgcgctctgaggctgacaaaggagggggcgcgcccctcccgctctgcgcccgcgcggccccggagagggggcgcctgaagcgccgggtagggaagtcagccgacttgaaacttttcctcttaaagaaaaaaaaaaaaaagttgtgcgcggctcacagtggggttttttttttccgccttcttttctcgtctcccctcccccttcttccttttgaaagtttcttctcctccccctgccccccctccccgcctgaccgcatggctgattcaactccagtgtcaatcaacttctttttcctcctcttcctcatttaaataagtttaaagctcctcctccccccggcccaccaaatctgaactttataaattgggctttgcgcgccccagcccggagtcagaaaggcgaggggcgccgggaactggcgtgtgggactccagacaggagaggctgcgccttccccgcaccgggaccttcgcgacacaccagatcctcgcccctggctcgcgcgaacgcacaggatgaccaccaccctcgtgtctgccaccatcttcgacttgagcgaagttttatgcaaggtaaaggggggcggagcatttgcttttcaaaaagtctttttcttttgccttaagaaagaacccccaaaagtttgggtcttggaaggcaatggggaaagtggtgcagcgagatgattcttttctcctccggcatttctcccaagtttgaaggaatttggccccgtccttcccaccctttgagtttcaacagttgctggcggggattacatgtgaatctggaggccagggttttgaggggcgaagtttgcctggcagggcagcccgggggcttcggggggagggctgggattgggacaagttttgggcgatcctgttttacgtaacgtgctgctggatcccaggtttgctggtctgatcgggttcccagtctgcgccctaggtctgtccagcggcattacccacccgtggggttgggagtgggaggtccctcggggaagtgagtctcgggacaatgttttcctccactctttggggggagctggggatatgcgaggaagaaaggccaagttgtgattcaaaaagatgttgcagaacaagtttgcagtggggcttgagtccgccctagctccgttgggcttcttcccgcgatagccgatcgtgcagcaaactttggggtgaaagaggcattcaggttgacccgcttacctgtgttgccgaggcattgcggctcatcgattgcgggcggggttggggggggag

SEQ ID NO: 1710 - DNA, 855 bp, Homo sapiens
cccctccccgcctgaccgcatggctgattcaactccagtgtcaatcaacttctttttcctcctcttcctcatttaaataagtttaaagctcctcctccccccggcccaccaaatctgaactttataaattgggctttgcgcgccccagcccggagtcagaaaggcgaggggcgccgggaactggcgtgtgggactccagacaggagaggctgcgccttccccgcaccgggaccttcgcgacacaccagatcctcgcccctggctcgcgcgaacgcacaggatgaccaccaccctcgtgtctgccaccatcttcgacttgagcgaagttttatgcaaggtaaaggggggcggagcatttgcttttcaaaaagtctttttcttttgccttaagaaagaacccccaaaagtttgggtcttggaaggcaatggggaargtggtgcagcgagatgattcttttctcctccggcatttctcccaagtttgaaggaatttggccccgtccttcccaccctttgagtttcaacagttgctggcggggattacatgtgaatctggaggccagggttttgaggggcgaagtttgcctggcagggcagcccgggggcttcggggggagggctgggattgggacaagttttgggcgatcctgttttacgtaacgtgctgctggatcccaggtttgctggtctgatcgggttcccagtctgcgccctaggtctgtccagcggcattacccacccgtggggttgggagtgggaggtccctcggggaagtgagtctcgggacaatgttttcctccactctttggggggagctggggatatgcgaggaagaaaggccaagttgtgattcaa

SEQ ID NO: 1711 - DNA, 20 bp, Homo sapiens
aaactcaaagggtgggaagg

SEQ ID NO: 1712 - DNA, 19 bp, Homo sapiens
gaacgcacaggatgaccac

SEQ ID NO: 1713 - DNA, 121 bp, Homo sapiens
  misc_feature 61: n = A,T,C or G
ggggggcggagcatttgcttttcaaaaagtctttttcttttgccttaagaaagaacccccnaaaagtttgggtcttggaaggcaatggggaaagtggtgcagcgagatgattcttttctcc

SEQ ID NO: 1714 - DNA, 20 bp, Homo sapiens
gcagcaggagtgtctcacaa

SEQ ID NO: 1715 - DNA, 20 bp, Homo sapiens
ccagtttccctccactcaca

SEQ ID NO: 1716 - DNA, 149 bp, Homo sapiens
gcagcaggagtgtctcacaaatgcacgactttcaaattgcagtttcctacctttctccatgtacgttatcgagagagagagagagagagagagagagagagaatctgcttgctttctttccggcacaagtgtgagtggagggaaactgg

SEQ ID NO: 1717 - DNA, 603 bp, Homo sapiens
ctcgctctgacccacccagttctaagctgtcttctgacctggagctcccactctgggaggcagcttgggccctgaagcattcactctgcctcctcagccaccgggccccgcccactcccagggaggggctccctctgaagccgcacacccaccaccccgagccctttctcaggctcactgccaccccagccggctcccttccctgggaacctccgtcataaagaaggcgaggccctgatctggcctgtctctccgccctggggccttcctcacctcagggaaccttagttatacatatgggrgttacgccttgagcttgtattaagcacctttcatctggagagctcctggctgctgggaggctaattagctgctctctggaaagagtgagtaagagctgacgtcctagccagggaactgcctagctaggcatggggctggccctcctgggagaggtgtgtgagccatcatcttgggtcacccacttctccatatttctccttctgtaggacctcctcacagagtcccttctctctggctaatgatgaagcccaccgtttactgagtgcttattatgtgccaagagcttgctaagccccttcg

SEQ ID NO: 1718 - DNA, 401 bp, Homo sapiens
aggagaaatatggagaagtgggtgacccaagatgatggctcacacacctctcccaggagggccagccccatgcctagctaggcagttccctggctaggacgtcagctcttactcactctttccagagagcagctaattagcctcccagcagccaggagctctccagatgaaaggtgcttaatacaagctcaaggcgtaacycccatatgtataactaaggttccctgaggtgaggaaggccccagggcggagagacaggccagatcagggcctcgccttctttatgacggaggttcccagggaagggagccggctggggtggcagtgagcctgagaaagggctcggggtggtgggtgtgcggcttcagagggagcccctccctgggagtgggcggggcccg

SEQ ID NO: 1719 - DNA, 737 bp, Homo sapiens
ccctcttcactcccagaggccatttgacagagcagcgattgctcctctctctaggtcaaccctttaaccaccgcaacattcatttactagtctgcatgtccactgactgctcaaccactcactcacccatgcgcgcttatacactcacttgccctcccactcatccccatatcctctcacatatccccttacctgtccactccctccctcatcccagtgaatacctgaacatctgaggtgccagcctggtgctaggcacagccagcagaaaagctctaagcagttgtcaagggcaaagcctttggaatcagaaggatgtgaatcctgactgtactgtttcctggccacctagctatgggcacatttctccaatctgtgagccttagtttcttcatctgtaaaacagggacctcatgcaccttcctttcagggaggctgtaaagatcggctttaggattaatgcatgcaaagtgcttcaaccagagcccagagaacacagctgtggtcaccgggcctctcagcagccatgtcctggcygtggggactatagttggccccatctgaccctgggctgaccctgggacaggcaggggcccattcctgcccctcagctaggctatgctccctggacaggtggtccccacccccaaccctggaatagagggcaataatcacccagcttcccatgcatcccttccctggctttctttccctcagggcgccctggggttttcagg

SEQ ID NO: 1720 - DNA, 842 bp, Homo sapiens
tgtggtcaccgggcctctcagcagccatgtcctggcygtggggactatagttggccccatctgaccctgggctgaccctgggacaggcaggggcccattcctgcccctcagctaggctatgctccctggacaggtggtccccacccccaaccctggaatagagggcaataatcacccagcttcccatgcatcccttccctggctttctttccctcagggcgccctggggttttcaggtcagccaagacacctggagcaagatctagcttgctctctcccctctctgccaaggaagttctctgtgacagcagcagggggtgggaactggttgagagcatctgaccctctgagggagcattttccttcccacatgaggccctatgtgcccaggacctggttagcccccatcctcttcccttccacccagagccccagtgcagactgttccctccagctcatctgggagttccctggggcaggaggtgcaccctgaatgccaaaaggtgggcttagctgtggggtcagctagggcaggggaaaagagagggactggagcacggctggggcaggggctccgtgtgaagggatttccttcatttcccctagacaggcagccatgtgaggtgcacaggggagcgttgtgggccccttggcttttattaagggatgtgtagaaatgtgggtgtgacctttgagtggctcacaccagaatgcaaattttctacacactggcctggtgaccttggataagtgactggtaaaaacttagtggtttaagaaaacacgtgacatactcagcatgcactgacacccaagaagtgcttgttataaaggggatgggc

SEQ ID NO: 1721 - DNA, 19 bp, Homo sapiens
atctggatgcttcccttgg

SEQ ID NO: 1722 - DNA, 20 bp, Homo sapiens
tttggcaaaggctgtagttg

SEQ ID NO: 1723 - DNA, 250 bp, Homo sapiens
atctggatgcttcccttggctccagttgctgacaaccttatggtaacagtctttgtgtgtgtgtgtgtgtgtgtgtgtgtgtgtgtgtgtgtgcacttgtacactggcacattttcactttccaccaagattacactgtccctgagggtagagacaaaataattctctttctctcttccctttgtctttatctccctgcctctttctctctatctctctccctctcttcccaactacagcctttgccaaa

SEQ ID NO: 1724 - DNA, 22 bp, Homo sapiens
ggcagggagataaagacaaagg

SEQ ID NO: 1725 - DNA, 22 bp, Homo sapiens
tgctgacaaccttatggtaaca

SEQ ID NO: 1726 - DNA, 429 bp, Homo sapiens
gatcagctgaaccagggcaagggaagagagtggctactgggggtcacagggcaagagcagggagcttcgagctgggggatgcccagcctgagcctgtgggaggggagagtggcaccctgtcctggtcacagatgaggctgggaggggtgtgtcctattttgaagaagaggccttgctttggcaaaggctgtagttgggaagagagggagagagatagagagaaaagaggcagggagataaagacaaagggaagagagaaagagaattattttgtctctaccctcagggacagtgtaatcttggtggaaagtaaaaatgtgccagtgtacaagtgcacacacacacacacacacacacacacacacacacacacacacacacacacacaaagactgttaccataaggttgtcagcaactggagccaaggg

SEQ ID NO: 1727 - DNA, 22 bp, Homo sapiens
ttccaccaagattacactgtcc

SEQ ID NO: 1728 - DNA, 20 bp, Homo sapiens
tttggcaaaggctgtagttg

SEQ ID NO: 1729 - DNA, 131 bp, Homo sapiens
ttccaccaagattacactgtccctgagggtagagacaaaataattctctttctctcttccctttgtctttatctccctgcctctttctctctatctctctccctctcttcccaactacagcctttgccaaa

SEQ ID NO: 1730 - DNA, 20 bp, Homo sapiens
gcagtaaacaggagggcaaa

SEQ ID NO: 1731 - DNA, 20 bp, Homo sapiens
ccctggaaaccacacaattt

SEQ ID NO: 1732 - DNA, 191 bp, Homo sapiens
gcagtaaacaggagggcaaatatctcttcaatatacttattccctttcttttggatatacgtgtgtgtgtgtgtgtgtgtgtgtgtgtgtgtgtgtgtatccagcaggtttttctcattttaaaaactccatagaaatagtgatgtctaatgtactaactcttacatatgtaaattgtgtggtttccaggg

SEQ ID NO: 1733 - DNA, 21 bp, Homo sapiens
ccatcaattcccatatcatgc

SEQ ID NO: 1734 - DNA, 20 bp, Homo sapiens
gattgcgctgttgcactcta

SEQ ID NO: 1735 - DNA, 183 bp, Homo sapiens
ccatcaattcccatatcatgcaaattttcccatgttcttaaaatgttattcaagaacatgatagtacatcctatggtcattttacttacttatttatttatttatttatttatttatttatttatttattttttgagacagagtcttactctgtcacccaggctagagtgcaacagcgcaatc

SEQ ID NO: 1736 - DNA, 869 bp, Homo sapiens
cacgggcaggtctaagtgctccaatttgagacacacttacgtgcgacacatacggatgtcaagttggtgctaagacgcccccatggcccccaggtattaccaggcaggtgcagataagactgtgtgatggtgtggaggagtgctgagaactgaagtagtaggatataaaggaaattgtaggcttgaagtttcaggccgcagggtccgattgcttgtgctcaaatcctagctctgtcccttgccaactttgtgtccttaagcagctttaattctctaaatcttgatttcctcatagagttaaaaatgacctctgttttaagcctctttggagggttgaatgagggggaaaaaaggcaaagcatttttrtagcatactggcacctggcacctgtagcaagccttccgaatgaggaaaaggtgttgcaaggtctaccccatacccttattgcaaaagacagattaaccagagagaggcatagcaagggtattcagggtaagttttacatgatgaagacacaaagacctgggggtatgacccagtggtaatgaactggagggatcttgccaaagcctgtttgttcagattctttctggcctctctgtgaggcatgtcctcgccccaaatatggggtaggatccttttgcaatgaggttcctgtggccaccttgaggggaaggtaggtcagaggtctctaggttttatggctggctttgcgggagagtagttctagtttttatgacacaccttggggaggagaaattctagtttctatgacctgcttcggggagaaatgggaaaagaagaaatgagggcaggagaaggtcagagagagactttgcttctgaggccttctaatctcctttagttc

SEQ ID NO: 1737 - DNA, 2693 bp, Homo sapiens
cacgggcaggtctaagtgctccaatttgagacacacttacgtgcgacacatacggatgtcaagttggtgctaagacgcccccatggcccccaggtattaccaggcaggtgcagataagactgtgtgatggtgtggaggagtgctgagaactgaagtagtaggatataaaggaaattgtaggcttgaagtttcaggccgcagggtccgattgcttgtgctcaaatcctagctctgtcccttgccaactttgtgtccttaagcagctttaattctctaaatcttgatttcctcatagagttaaaaatgacctctgttttaagcctctttggagggttgaatgagggggaaaaaaggcaaagcatttttrtagcatactggcacctggcacctgtagcaagccttccgaatgaggaaaaggtgttgcaaggtctaccccatacccttattgcaaaagacagattaaccagagagaggcatagcaagggtattcagggtaagttttacatgatgaagacacaaagacctgggggtatgacccagtggtaatgaactggagggatcttgccaaagcctgtttgttcagattctttctggcctctctgtgaggcatgtcctcgccccaaatatggggtaggatccttttgcaatgaggttcctgtggccaccttgaggggaaggtaggtcagaggtctctaggttttatggctggctttgcgggagagtagttctagtttttatgacacaccttggggaggagaaattctagtttctatgacctgcttcggggagaaatgggaaaagaagaaatgagggcaggagaaggtcagagagagactttgcttctgaggccttctaatctcctttagttcaaagtactcagcctgcccaaggtccagacttcagggtattgttttctgagccccgacactatcaatgtttaccacattagaaatgaaaattaagaaaaagttaaagtagtatttattagtttaaaataatgaatgtatatattgttatatttataataaaaattttttaaattatatcttccaaaacaaaaaagtgagaaaatcagtattatttttaaaataatttttaatttttgtgggtacatagttcatgtatatatttatgaggaacatgagatgttttgtttggtaagacgtgcaatgcataataatcatatcatatagaatggggcatccatcccctcaagcatttatcctttgtcttacaaagaatctagttctactcttttaattatttttcaatatacaattaaattattattgactatagtcaccctgtggtgctgtcaaatactaggtcttacccattctttctattttttttttgtactcactgaccatccccaccttctccccaccctcttactacccttcccatcctctgggaaccatcccaaatcagtattttttttttttttggtgcgaccatacctggctaaattttgtatttttaatagagacggggtttcaccatgttggccaggctagtctggaactcctgacctcaggtgatccacccgtctcggcttcccaaagtgctgggattacaggcgtgagccacagcacctggccccaaatcagtctttttaatacatttttttcaagtctttttaatgtctggcttaatagaaaccagctggacactcatatttgcttctgcattcaatctactgcaatatcacatgtcatgcagcctctggaaaattctgtacacacaagagaatgagagggcacaagagaacgagagggcaaaatactaatgtcttagtgttgctataaaaatagttttgatcttgtgggggagaaaaagtaatatcttttcctcacctgtcgcaaggttcatggctgacacccctaaaaccaaagacagattaataagaggaaagcataacaaatgtattcaatatcagttttatgtgacttgggagccttcggaaaatgaagactcacagacctcgggtaacctgtgtttttatggacagccatgaagaagtaggatcggagcacagggagagaggatctaaaatttaaaaactgggggaagtcagcaaggcctgtttgctcagattcttcttggcattcccatgtgacatttcttttctctgtgtatggtgcaggacatctctcacatgagggtcttcggggagaagggagggagaaggtcagagaatgacctttctaggttttgctgttttctcaaatgcccgagtgccgtattttggggtaggatttctttttctttctttctttctttttttttttttttcctgagatggagtcttgttctgtggcccaggctggagtgtgatggtgcaatctcagctcattgcaacctccgcctcccgggttcaagcgattctcctgcctcagcctcccaagtagctgggattacaatggcgcaccaccacacccggctaatttttttatttttgtatttttagtagagatggcgtttcaccatattggccaggctggtctcgaactcctgaccgcaggtgatccacctgctttggcctcccaaagtgctgggattacaggtgtgagccaccgcgccggcttggggtaggatttctaagccacaacaatcttatgactctcctgacaggtctcaaggacgcccgggggcagaacagcagtctctgcaggcaggaaatgtatagtctg

SEQ ID NO: 1738 - DNA, 545 bp, Homo sapiens
tcagataaaaggcatgggctcagggggcctggtgccagagcagacggcatcctatagagactatcttttactctggagaagctagagcagtacacacagtattcgacattcaggggtggggcctgagattctgtatttccaatgaactcccaggtgatgctgaacagctgccatctgtgggtcatctcgaatagcaagggatgagatgactcttaagagacaactcaagctgttcactgcagcaaaaataaaacgagtggggtgaatgcagatgtcacagggctgtttggtgycgtggaaaaatgaaggtggggcttatcatcaagaagtcctttacacatccatgactttctgtccaactcataggagactgtgaagaaattaccttttcctttttaaaatgaagaaactgaagtgtaagaagattgaacacagcagggtcaaaaacattaggagtagatacaggtgccccacaccatccttgaccccacacacacttccagaaaacatcaagcaaggagcaggcaaagagctgtcataggagt

SEQ ID NO: 1739 - DNA, 545 bp, Homo sapiens; identical to SEQ ID NO: 1738

SEQ ID NO: 1740 - DNA, 20 bp, Homo sapiens
gtcaggaaggagggcagatt

SEQ ID NO: 1741 - DNA, 19 bp, Homo sapiens
ctccaaacactggctcagg

SEQ ID NO: 1742 - DNA, 180 bp, Homo sapiens
gtcaggaaggagggcagatttgggggtaggaaagattgagacaaaaaaatgtgtgattccccgaacctccaaccccacagccacgcgcgcgcgcacacacacatacacacacacacacactcttgcacagttaaaacaagtagccattttcaaagcagatgcctgagccagtgtttggag

SEQ ID NO: 1743 - DNA, 261 bp, Homo sapiens
ggtgggcggttgggaccaaggagatgcttctcactccagctcagccatgtggccctctctcaacccaggcaaagaggccatgctgcgacagaaggactatgagaccgccaccctctcggagatcaaggccytgctcaagaagcatgaggccttcgagagtgacctggctgcccaccaggaccgtgtggagcagattgccgccatcgcacaggagctcaagtaggtggccccagacacccctaccctgtggtgaggggctga

SEQ ID NO: 1744 - DNA, 255 bp, Homo sapiens
ggtgggcggttgggaccaaggagatgcttctcactccagctcagccatgtggccctctctcaacccaggcaaagaggccatgctgcgacagaaggactatgagaccgccaccctctcggagatcaaggccytgctcaagaagcatgaggccttcgagagtgacctggctgcccaccaggaccgtgtggagcagattgccgccatcgcacaggagctcaagtaggtggccccagacacccctaccctgtggtgagg

SEQ ID NO: 1745 - DNA, 401 bp, Homo sapiens
cccgtgacactcctgttacttgtttcacttaaggacaaaaagctgcatcatggcaaatttcttacattttcttctgtgtgtttctctggcttatgaaatttttccctaagttgtggggacagggtcaagaaggatgaataacaaaaataacctaaaagaagagtattttatgacatggaaagctggtcagaatataatgtragattgggggttttcctaaagcagcttattatataaaacaggctttagttatctgtcaggggacacttgagtacagaaaccgggaaaaaatgtttaatttcaaatacatatactttaggattccctcaaatatttacacgaaaaaaccaaaaggattaaaatcattttttttaaagttgatactgggtagtaagattttc

SEQ ID NO: 1746 - DNA, 255 bp, Homo sapiens
cccgtgacactcctgttacttgtttcacttaaggacaaaaagctgcatcatggcaaatttcttacattttcttctgtgtgtttctctggcttatgaaatttttccctaagttgtggggacagggtcaagaaggatgaataacaaaaataacctaaaagaagagtattttatgacatggaaagctggtcagaatataatgtragattgggggttttcctaaagcagcttattatataaaacaggctttagttatct

SEQ ID NO: 1747 - DNA, 20 bp, Homo sapiens
tgcaacagggatgagtgaaa

SEQ ID NO: 1748 - DNA, 20 bp, Homo sapiens
gtatggtgtgctgtgggtgt

SEQ ID NO: 1749 - DNA, 307 bp, Homo sapiens
tgcaacagggatgagtgaaagggaagggggcatggggaggtggcatgagatttgggagggggagcaggctgtcacccacacgccatccacatcccacacactccacacaccccacacacccctcacacatgccacacccacagcactccccttcactccacacacacacaccacacacgccacacctcacaccacacacaccctacacctcacacccacagcacaccacacacacacacatgccacacctcacaccacacacacctcacacaccacacacacacctcacacccacagcacaccatac

SEQ ID NO: 1750 - DNA, 20 bp, Homo sapiens
ccccagacacacaccttaca

SEQ ID NO: 1751 - DNA, 20 bp, Homo sapiens
gggatgtgatgggtgagata

SEQ ID NO: 1752 - DNA, 131 bp, Homo sapiens
ccccagacacacaccttacacaccacactccacatacacacaccacactccccatacacacctcacacccaccacatccataccatacacacacacctcacacacaccccatatctcacccatcacatccc

SEQ ID NO: 1753 - DNA, 20 bp, Homo sapiens
aagagttctccctgctctgg

SEQ ID NO: 1754 - DNA, 20 bp, Homo sapiens
cagcctctgaatgacctcct

SEQ ID NO: 1755 - DNA, 260 bp, Homo sapiens
aagagttctccctgctctggctgctggctaaatttgcgagggtggccttgctcaagcaggaaggagggagagagagagagggaagaggtcctggatgtttaaggaaatagaaagcactgccaagagctgtgctgcctgggataagggctcttgatgcggggtgcagggaagaagctgagaccacaagcttctctctcgcttgtggtatccgctatgcccagggcatagggacagagacacaggaggtcattcagaggctg

SEQ ID NO: 1756 - DNA, 576 bp, Homo sapiens
ccaagatggaccaagagggaacctggagagtgtggtcagagggtccaggagggaacctggagagtgtggtcagagggtccaggacaggcttctccaaggtccagggcagtgtcgtccaaccagctcagacattgagaaccaccatgaggctagaaacacagctcccactcctgcatctgtccccactccacacacccactcaagaaaaatcactgcagcttcatgctgaaggcgggagtgaaaccaaaagaaaatcccccagccaaacttgagcaataaaggaaaccaaatccatgggtgggataagctgcccaggaccgcacagcaggtcaaaggacaaggcggggatgaactgtcccttagaatatgcactgttttcaatgatgaaaataktgtctcctctttacaaatcccggaaaaacagaagggagaaacaccatgtatcattccatccctctgacaaagctgctgtcacagctgtgatattttcctgatgggctgtgtatgtgtgcaagtacacacacaccacgcacaagggtaatgaagttgccctaacagggaaggtgttttctcttc

SEQ ID NO: 1757 - DNA, 476 bp, Homo sapiens
ccaagatggaccaagagggaacctggagagtgtggtcagagggtccaggagggaacctggagagtgtggtcagagggtccaggacaggcttctccaaggtccagggcagtgtcgtccaaccagctcagacattgagaaccaccatgaggctagaaacacagctcccactcctgcatctgtccccactccacacacccactcaagaaaaatcactgcagcttcatgctgaaggcgggagtgaaaccaaaagaaaatcccccagccaaacttgagcaataaaggaaaccaaatccatgggtgggataagctgcccaggaccgcacagcaggtcaaaggacaaggcggggatgaactgtcccttagaatatgcactgttttcaatgatgaaaataktgtctcctctttacaaatcccggaaaaacagaagggagaaacaccatgtatcattccatccctctgacaaagctgctgtcaca

SEQ ID NO: 1758 - DNA, 19 bp, Homo sapiens
gatatcaccgctgcactcc

SEQ ID NO: 1759 - DNA, 21 bp, Homo sapiens
tggccaaattatttcccagat

SEQ ID NO: 1760 - DNA, 210 bp, Homo sapiens
gatatcaccgctgcactccaacctaagcgacaagttgagaccctgtctcttaaaaacaaaacaaaacaaaacaaacaaaaaaacccaaagttgaaaaccacacgccttgatgtcagcaaggccaccacactagaagtgtaaattggtttaaaaaacaataataataatttctgggaaattaatcaattaatctgggaaataatttggcca

SEQ ID NO: 1761 - DNA, 606 bp, Homo sapiens
gggcgtgcatgggctgctaattaagcacgccctactctctatgctcgtgcttggcgcctctgttttctggagtgaaactatgcctttggtgtgaatgagaattcagtaagcaaaattctctggggagtttctggggaagaaaaagaggaataagtaggcaagaccctaaaaagaagccacctgcctctcccagtccctccrggaggactccaagagggcaaatctgcaggcagtgagctcagggccagcgggaggccctggagtttggccgtcacagagtggggcagcatgtgggggaccaagggagggctatcattgcagccccactcctaggaaggccaaaccatgggattaccactcagagcttttttctaggcttaaaaaatttttcccttatattttaaacactgtttatgaaattttttacctgcttttcccacttcccatgctaaaaaatttttctaagttattaagcactcataagcattaatgtctgcgttcattgtcttttttgttttgtttttttgagatgagtctcgctctcttgcttagtctggagtgcagtggcacgatctcagcttactgcaacctccgcctcccgaattc

SEQ ID NO: 1762 - DNA, 255 bp, Homo sapiens
gggcgtgcatgggctgctaattaagcacgccctactctctatgctcgtgcttggcgcctctgttttctggagtgaaactatgcctttggtgtgaatgagaattcagtaagcaaaattctctggggagtttctggggaagaaaaagaggaataagtaggcaagaccctaaaaagaagccacctgcctctcccagtccctccrggaggactccaagagggcaaatctgcaggcagtgagctcagggccagcgggagg

SEQ ID NO: 1763 - DNA, 20 bp, Homo sapiens
aaaggcagttagaggcaagg

SEQ ID NO: 1764 - DNA, 20 bp, Homo sapiens
cccaaagtggaactgctagg

SEQ ID NO: 1765 - DNA, 238 bp, Homo sapiens
aaaggcagttagaggcaaggcacggtggctcacacctgcaatcccagcgctttgggaggctgaggtgggaggatcacctgaggtcaggagttcaataccagcctggccaacatggtggaaccctatctcaaagaaaaaagaaaataaataaataaataacggcagaggaaaacagcacggtggctcctcaaaaaattaaacagagaattcccatgtgacctagcagttccactttggg

SEQ ID NO: 1766 - DNA, 20 bp, Homo sapiens
aaaggcagttagaggcaagg

SEQ ID NO: 1767 - DNA, 20 bp, Homo sapiens
cccaaagtggaactgctagg

SEQ ID NO: 1768 - DNA, 238 bp, Homo sapiens; identical to SEQ ID NO: 1765

SEQ ID NO: 1769 - DNA, 588 bp, Homo sapiens
  misc_feature 1: n = A,T,C or G
nuggtgcctttgttaggcctcccagaaaaagctgcaggccccctgcttcttggccctggtgaccctctgggtgtctggtgctatgtcttttgaaatgggctgtagatgggtgtaaaccaggaaatgcaggctccactcccccctccccatctcctcctcttggccagaggcccgtctcagagttctctcatcagtggggaaaaaaaacaacaggacttctttcttgctctgtgaatgattaactttgattaaatagacagtggatgggaagtgagagcatgctgaccgctgacattgactgggctcctgatgtgtccrgggtatcttgctggctgttttgcttccattgtcataatcttcacaaagtggtgatgttctttatccccattgtaaggtgaggcaattgacacctagacagtttaactaaagccacacagccagtgagtggtgaggacctgctgggttaacattgtttaagtgtctgttgtggacacagcaccaggctaagtctttcaggacatagggtctaatttggtcgtctttcattctgtgccattgtaggccttgttatccccattttacagatag

SEQ ID NO: 1770 - DNA, 3379 bp, Homo sapiens
tgctagcccagatgaaggaacacactgggtgccaaggtgtcccccatgatcccttgatgctacctgggaccgtttagtagacaagggcaattccatgggtcctggagtcgttctttttgtctcatgcctttccatgagcaccctttctcttgtctttcttgtactttagtaatgaactctagacactattaactacttagggtgtgctgggctttttgcatagattatctcattgaaactccttaccaaaccagttgagaaaggtattatccctgttttacagatgaggaaactgaggctcagaaaggtcaagaacttgcttaggttccaaggttagtaagtggcagacccatattgaacccagctcttctgtgcccaaatccgttcttagccactaagccttggtcctcagagtgtggtctctggaccggcagcatcagcatcacctggatacttgttagaaatgcagtttctctgccggcctagaactttggaatcagaaactggcggtggggcccagcaatctgtattttaacaagccctccaggtgattctggtaaatgttcaagtttacatattcaagtttgagaaccaccgcactgaattatcctgctgttcttttttctattttttctgcctggcttctccccttttgtcattgggccagtcactgtgagcccagactttgaaccctggctgctcttcaggggcttcatgccccttttaaagaggtgcagtaattcgtcctctggggcctccacaggaacccctcccaagtccccaaaagcagttgacagaactgatgctccagctgacagcctggtgaccggaaccaccatgggggtcagagttcccagtcactatgcccaaggaggtgctttgaggggtccgggtgacccaggggtggactgtgggacagaccaggacagaagctcctgctgggagattattttaggggcacagaaaggagacttggaaaacttccttgtccaagcaggatctctttctttcttgcaaatttgtaatgataagtggtttgacctttggagaggagcttccacacaggggtttggaatctaggcaggtccttgtttctggtcaacaaggcacattcaggagaaatgaccctggggagaggatagaagctaattttttttttttttttttaagtagagacagggtcttgctatgttgcccaggctggccttgatctcctggcctcaggcaatcctcctgcctcagcctcccaaagtgctgggattgctggtgtgagataccagagccagccttatttaatttttgagcccctaccgtaagtctagttttgtgctatttaattcttagcccaaccccaggaggggtggatttcatcatcccattccacagataagaccatggaggtttcaagctggaagactgagggtcatacctcaactacatggaggggtcaagttaggggccagagtctgccagaccccgggttcccatattgtatgagtagcaggctgggccaaatccctgtcagctgggggagttctctatggaattgagtgacccagagctctcagcatctgtgccaaaaaaaccaaatgacctcacttttggtggcttttccttctttggggaaggaatgtgctggccactgctgggagctacagcctgctgaggcctgtgtgctctcagacctgcaagggccagaatcagactccagacatgggggaggggttacagcaggaccaaactgtaaccccggaggaccggggaggaggctgttctcacactggcctcccggagcgggtgccactctgcttcgaagaccagctccgcccatttagtaatcctcatctcagcaggcttaccagccactgttcagtagctgaactagctcaattacatcagtcccccgagagggctctggtccagggcctgtctttgagcctggtttctttccaatgggccaaatgggttaaaaacaaaaccacgtcttgatataaaaggcttagcggggtcctggaacattttagtttaaaagagaaataacagctttattgagatgtcattcacatacccatacaattaacccatttatacaacttcatggtttttaggatagtcacataaatgggcagctatttttgccatcagttttgaacatttttatcaccttagaaagatattctgtaccccttagctatcacctcccccaactcctccgttcccagccctaagaaaccactaatcaagccgctttcggtcttcctaggtgcttttgtgttttaacatctagtgagtgcttggtctgcgtctggtagcagactgagccctttgcactagctcacatagccctccctcgtgactactttatgggctgcaggctcattttatctttattttattattactattttcaccatcatcattctggcccacagaagtctttactgatgtgagaaccaaggctccgggaggcccagtcgcaagtactggacagagctagctggtggctggcagttggggtgggctcttgggtccctgggaggggtgaggctgtggatggtgacagattggctgaggcagttgactctcattggcgaggagctaagaggacagacctgtttcttcactaggatcgtgtgtccacctgttttaaagtggctctgatttctcctgggagcccataggttccacctgtaccaggcaagaaggagctgggcagtctgccttctggggggccttggatggcagggaggccagatcagagtctcatggtggcccaggagccctctcaagcacggtgcctttgttaggcctcccagaaaaagctgcaggccccctgcttcttggccctggtgaccctctgggtgtctggtgctatgtcttttgaaatgggctgtagatgggtgtaaaccaggaaatgcaggctccactcccccctccccatctcctcctcttggccagaggcccgtctcagagttctctcatcagtggggaaaaaaaacaacaggacttctttcttgctctgtgaatgattaactttgattaaatagacagtggatgggaagtgagagcatgctgaccgctgacattgactgggctcctgatgtgtccrgggtatcttgctggctgttttgcttccattgtcataatcttcacaaagtggtgatgttctttatccccattgtaaggtgaggcaattgacacctagacagtttaactaaagccacacagccagtgagtggtgaggacctgctgggttaacattgtttaagtgtctgttgtggacacagcaccaggctaagtctttcaggacatagggtctaatttggtcgtctttcattctgtgccattgtaggccttgttatccccattttacagatag

SEQ ID NO: 1771 - DNA, 20 bp, Homo sapiens
cctctccaaaggtcaaacca

SEQ ID NO: 1772 - DNA, 20 bp, Homo sapiens
ggacagaccaggacagaagc

SEQ ID NO: 1773 - DNA, 139 bp, Homo sapiens
cctctccaaaggtcaaaccacttatcattacaaatttgcaagaaagaaagagatcctgcttggacaaggaagttttccaagtctcctttctgtgcccctaaaataatctcccagcaggagcttctgtcctggtctgtcc

SEQ ID NO: 1774 - DNA, 19 bp, Homo sapiens
gcttgctagggcttggact

SEQ ID NO: 1775 - DNA, 23 bp, Homo sapiens
cctttcctataggcactggatct

SEQ ID NO: 1776 - DNA, 309 bp, Homo sapiens
gcttgctagggcttggactggcccgatgttggcagcctccctcacgcaggccactgcagattctacagactcgcccaggctccaggcctcccctgccagacagctgcagccagattcattcattccttccttccataaattcttactgagcactcattctgtatcagggactagggttacatcgtgggcaaatacaggcactgtcctaagtcatggagcctgcagtctaatggagaagacaaacaataagcaaagattttatcaatgcgtgtatttttgtacactaagatccagtgcctataggaaagg

SEQ ID NO: 1777 - DNA, 20 bp, Homo sapiens
aggtcaccctatgcgtgtgt

SEQ ID NO: 1778 - DNA, 20 bp, Homo sapiens
ggcctttgctgtttgtttgt

SEQ ID NO: 1779 - DNA, 623 bp, Homo sapiens
gctgtaggtcaccctatgcgtgtgtgggtcaggtagctgtaggtcaccctatgcgtgtgtggagcaggtagctgtaggtcaccctacgcgtgtgtggggctgggcaacatggtgaaaccctgtctctactaaaaatacaaaattagctgggtgtggtggcacgtgcccataatcccagctactcaaaaggctaaggtaggagaatcgcttgaacccaggaggcggaggttgcagtgagcctattgcaccactacactccagcctgggcaacagagtaagactccggttcaaaaaaaaaaaaaagaaagaaagaaagaaagaaaagaagaagaagaagaaaacaaacaaacagcaaaggccccagagaaaagagagtaaggtctgttcaaaaaactgaaaaaaaaaaagtcacagtgcaggagggaagaagagggtgccagagactggagatcaactagccacatgggtgttcgggttcctgcagctgttgtttctcctgagagcagtggaagtcaccgaagacattttattttagctgaaagaaacaaatggggctgtggcgggctgagttgggctgggagtgccaatcagatgctggttacataattccacctgcatcttag

SEQ ID NO: 1780 - DNA, 20 bp, Homo sapiens
agatggatgctggtgatggt

SEQ ID NO: 1781 - DNA, 21 bp, Homo sapiens
aacaactccccacaggtaaca

SEQ ID NO: 1782 - DNA, 114 bp, Homo sapiens
tattatgtatcttttaccataatatatatgcgtgtgtgtatatatatatatataaatcaaacatataaaatctgtggtatagaaaaataacagtgttacctgtggggagttgtt

SEQ ID NO: 1783 - DNA, 20 bp, Homo sapiens
taagtgcagcaccagtgtcc

SEQ ID NO: 1784 - DNA, 20 bp, Homo sapiens
tcttcagacccaatgggaag

SEQ ID NO: 1785 - DNA, 182 bp, Homo sapiens
taagtgcagcaccagtgtccccaccctcaggccaagtaaccccatcattcattcactcattcattcgttcgttcattcattcaagattttctaaactcttaccctgtgccaggtactatactaatgctggcaaacagcagtgaacaagcgcagccttgtgaacttcccattgggtctgaaga

SEQ ID NO: 1786 - DNA, 24 bp, Homo sapiens
ccagggttagttagatatggaagc

SEQ ID NO: 1787 - DNA, 21 bp, Homo sapiens
ccagctgaaagaaagacatgc

SEQ ID NO: 1788 - DNA, 411 bp, Homo sapiens
ccagggttagttagatatggaagcacttttttcccccagttttgctgttacacacagagaatttatttatttatttatttatttattctgaaatggagtttcactcttttcacccaagctggagtgcagtggtgcaatcttggctcactgcaacctccgccttccagtttcaagaggttctcctgcctcagcctcccgagtagctgggattacaggcacccgccaccgaaccgagctaatttttgtatttttagtatagacggggtttcaccatgttagccagactggtctcgaactcctgacctcatgatccgcccaccttggcctcccaaagtgctgggattacaggcatgagccaccacacccggcccatacagagaatatttttaagcatgtctttctttcagctgg

SEQ ID NO: 1789 - DNA, 20 bp, Homo sapiens
ccttcacagaccaaagcaca

SEQ ID NO: 1790 - DNA, 20 bp, Homo sapiens
tctacccgctttgtctctcc

SEQ ID NO: 1791 - DNA, 139 bp, Homo sapiens
ccttcacagaccaaagcacaagtcactcttgtctcctcaagtccctctctctctctctcccagttaccatgaatcttagttggaccagcctttagagttcattgtggttttctgggtggggagagacaaagcgggtaga

SEQ ID NO: 1792 - DNA, 20 bp, Homo sapiens
ctccgcttgtcctttctcac

SEQ ID NO: 1793 - DNA, 20 bp, Homo sapiens
atcctttgatgggtcagcat

SEQ ID NO: 1794 - DNA, 380 bp, Homo sapiens
ctccgcttgtcctttctcacttgagaagttcctagcagttcacactagcacactaatctcagtgccaataaaatagcccagatgattaaatattacaggcaattctgttgctaattgctgaagctgagtaatgggtatatgggaaatcactatactattctctctactcctgtgtgtgaattttccataagttttaaaaaaattcattcatttattcatgcaactagcatgcatcatggataaagagagaaatcagaatcatctccccaagaatttgtaattttattaaattctaaattgcttgctaccttatgccaccccaggaattaaatatctattggcatttgtaacataaaggttatgctgacccatcaaaggat

SEQ ID NO: 1795 - DNA, 648 bp, Homo sapiens
tgccacactcctgtccaaaggccctcaccaccactgttcatcaacactggatactcggtgaatacctagtatgtgcaagcttgattcgtgcttacctgctctttggggtgctgggatgagctcatcagggagctcctgaaagtccattactagggggaccccaggagactccacaaatccacctttgatcatccaaggagcctcagatcagttacagatcagtgacatcccctgagaatcctctaaatgtctttagagaggagtttcacaacagtgccccaagaaagtgtaatgaaggcaggcaggctgccacatatctgtcctttctgactctcctagcccaggtactaactgggcaagkcaatggccgagtggctgagagccagaagataagaaggcaagaggagggaaatcagacagggacaaaggccactcaactgggaccccacttgttgtccttgaagcctaggaatggtcctggcggagtggggctcatcgtggctccccacatctggcctcttccaaaactctacatgcagcccaagcctcatatccagagcagtctcttgtcttgcagagcacagccagcttccaaatggcacaagaggctgctgagccataaaatataaactcatttagaagcattcc

SEQ ID NO: 1796 - DNA, 20 bp, Homo sapiens
atccaaggagcctcagatca

SEQ ID NO: 1797 - DNA, 20 bp, Homo sapiens
cattgccttgcccagttagt

SEQ ID NO: 1798 - DNA, 176 bp, Homo sapiens
atccaaggagcctcagatcagttacagatcagtgacatcccctgagaatcctctaaatgtctttagagaggagtttcacaacagtgccccaagaaagtgtaatgaaggcaggcaggctgccacatatctgtcctttctgactctcctagcccaggtactaactgggcaaggcaatg

SEQ ID NO: 1799 - DNA, 648 bp, Homo sapiens; identical to SEQ ID NO: 1795

SEQ ID NO: 1800 - DNA, 20 bp, Homo sapiens
tgctgtctcactcccatcaa

SEQ ID NO: 1801 - DNA, 20 bp, Homo sapiens
tttgaaccttccaggcctaa

SEQ ID NO: 1802 - DNA, 269 bp, Homo sapiens
tgctgtctcactcccatcaattataatcagctttgcagatggcttttaaaaaataaatcttcaggcccataaaaatgctcccctacaagccctggcctggcctcaaatcacaggccttgtgaccatgctttcaacagccccacgatcacccaccaccaagaaacaggaaaaacaaggtaacagagaggaggctcccttcccccagccgactgctctttggcctggagctgaacatttggggcctctgatttaggcctggaaggttcaaa

SEQ ID NO: 1803 - DNA, 20 bp, Homo sapiens
ttaacctctctgggcttcca

SEQ ID NO: 1804 - DNA, 20 bp, Homo sapiens
agaggcctggaaatgaaggt

SEQ ID NO: 1805 - DNA, 373 bp, Homo sapiens
ttaacctctctgggcttccatttccctgtctgtaccaagaaaactaacagtcccttccccaaagagttgtttgacatgtggaggtactccaaaccattcagcatttaatcagtgtgaactattcgtctttgtacttacttggaaaaccaagacatagttaataagtactggttggttggttggttggatggttgatataaaacaggtaacacacctttccagccttccctctctcatcttctgttcccttcccaggaggtggacagtgtttacatttacctccgagtaccttgggcttgtgaaatgctttgaagcaaaatgaatggctccctttaagagtcaagggtgccagcaccttcatttccaggcctct

SEQ ID NO: 1806 - DNA, 20 bp, Homo sapiens
ttaacctctctgggcttcca

SEQ ID NO: 1807 - DNA, 20 bp, Homo sapiens
agaggcctggaaatgaaggt

SEQ ID NO: 1808 - DNA, 373 bp, Homo sapiens; identical to SEQ ID NO: 1805

SEQ ID NO: 1809 - DNA, 20 bp, Homo sapiens
tcactgttgctctgctctgc

SEQ ID NO: 1810 - DNA, 20 bp, Homo sapiens
atctcaaaggaaggcggttc

SEQ ID NO: 1811 - DNA, 143 bp, Homo sapiens
tcactgttgctctgctctgccctttcaggcatctcccctctccccacctctgtcctacaacatcacacacacacacacacacacacgtggctgaaatgccagggaaaggtaaggctcccagcagaaccgccttcctttgagat

SEQ ID NO: 1812 - DNA, 20 bp, Homo sapiens
catcagcctctgtccacttg

SEQ ID NO: 1813 - DNA, 20 bp, Homo sapiens
ctctgggcctgactctgaag

SEQ ID NO: 1814 - DNA, 257 bp, Homo sapiens
catcagcctctgtccacttgtggactctggtcccacacaaaccccgcctcccagtcagtagaaagagtgtcaaaagcaacacgtttaccttacgtcttatccctcacctgtaataccacctccttaatatcaccctactgagaactaggcaggccagaaattctgcagactgaggcccacgaaagataatctagagaattaacaggaaacaaacaaacaaaaaatgtggatctgaatcttcagagtcaggcccagag

SEQ ID NO: 1815 - DNA, 20 bp, Homo sapiens
cggctgctaacctttctctg

SEQ ID NO: 1816 - DNA, 20 bp, Homo sapiens
tgtccgcctagttcagtgtg

SEQ ID NO: 1817 - DNA, 376 bp, Homo sapiens
cggctgctaacctttctctgctgcttctcccaggccgggtccaggagcaggtcccggtcccagtcctcttctggctgcatgtaatcgttggtttgctgagaatcataatggtccatgatggtgcgcgcgtgctagggtctggatttcttcctccaccttctctctgagcaacggctgctgccctggcgtggggagggagtagggctgggctgggctgggctggcggggccgggctcgctcccctgcgcccggttccgccgcggcgctgctggcgaaggctgctactggcggcgacagcggcggctgggctcgcggactgcctgcctctgggcgggcgcttggacctaatctccacgcacactgaactaggcggaca

SEQ ID NO: 1818 - DNA, 568 bp, Homo sapiens
catagaggagcctgccagaacgcgaggcctgctccttcccgggcattagcgcgtttagactctcctcttactaagcccagggaaaggagtcctggcaggtggcaagcagaagttagagctatttagtcactcccgccctccatcctcctccaatgacaataaggttttgtttgtcaggcataaggttaccggattggcctgtgaagtccagaagctctttccgcgctcggctctttgagcctcrgtttccccatctgtcaggcgtgtgtatgtgggaggggggtacggagtagatttacctagatcactcggggttgtcccttccagttttgagggtgatgtcggggtgtctgtgaggaggagggaggaccctgccacgcgaaggtagttttggtcgcagcagccagccaagtgtgcccgcggagaccggcagggaattccgggaggccccgctgtggagcggtccccagagcccgagggcgagctagaagagttcctgcggcgaggcgggaacgctcggtagcctctgagagcagttcgctggcgagaaaccgggttcctgcagggc

SEQ ID NO: 1819 - DNA, 255 bp, Homo sapiens
catagaggagcctgccagaacgcgaggcctgctccttcccgggcattagcgcgtttagactctcctcttactaagcccagggaaaggagtcctggcaggtggcaagcagaagttagagctatttagtcactcccgccctccatcctcctccaatgacaataaggttttgtttgtcaggcataaggttaccggattggcctgtgaagtccagaagctctttccgcgctcggctctttgagcctcrgtttccccatc

SEQ ID NO: 1820 - DNA, 20 bp, Homo sapiens
tggtttgttggatgctgcta

SEQ ID NO: 1821 - DNA, 20 bp, Homo sapiens
cccacctccttgtacattcc

SEQ ID NO: 1822 - DNA, 389 bp, Homo sapiens
tggtttgttggatgctgctattcgtttctttcttgctttctttcttctgcttctttcttcctttctttccttcctcccttttttccatcatctaaaaatcagaattcctttgagctggagctgaaaaaaaagaatgaatgaatgaataaataaataagaaaaaagaaagaaaaatcagattacatttgctgtcataccagaactacccagtctatggccaagaaaaagttaacctatccccccactgggaaactctaaaacattttaggagccacagaagatcacaatgtgtggacccatcaaacagcttttcttgaattgctttggaaataaacctgcagggaggaggcaattatctggaatgagaaaggaatgtacaaggaggtggg

SEQ ID NO: 1823 - DNA, 21 bp, Homo sapiens
tcagaattcctttgagctgga

SEQ ID NO: 1824 - DNA, 21 bp, Homo sapiens
ttcttggccatagactgggta

SEQ ID NO: 1825 - DNA, 126 bp, Homo sapiens
tcagaattcctttgagctggagctgaaaaaaaagaatgaatgaatgaataaataaataagaaaaaagaaagaaaaatcagattacatttgctgtcataccagaactacccagtctatggccaagaa

SEQ ID NO: 1826 - DNA, 624 bp, Homo sapiens
taagtctggagcatttgttatgaaaccagcccaccagtctgtggtcatagctcacccataggttctttgacttccattcaagtccaggtcccgggctctgggagttctgctcctgcagagcttgtctggatgtgagaacagaagccaagggaagtatttgctttgcaacaaaataaaamaggggacaaggatgcatttctggaggcgctcaccattttacagaaaggagtcatctgtttctcataaggtggggtgtgggaagtggaatctattctcctggcctgtctggagtagctccttactagtctggccacagctcctgcaggtcaggaccaggccccaccacagccagggctacactttgaaaacggacttgaatttcttttgggtcttcaaaggttaggctggaagcctctccagttgctcccatcctctcctccataactgaatggatatgtgtgcgcctggatgtgtgaaagcacggaagagtgggaggacattgtgggggaaggtgtccaggtgaggcctcagttcctggctctggaaaagactacattcaccctgaattaactttctaaaggctttttaagctctccagttcctctctgtgggactcaagaaatc

SEQ ID NO: 1827 - DNA, 255 bp, Homo sapiens
taagtctggagcatttgttatgaaaccagcccaccagtctgtggtcatagctcacccataggttctttgacttccattcaagtccaggtcccgggctctgggagttctgctcctgcagagcttgtctggatgtgagaacagaagccaagggaagtatttgctttgcaacaaaataaaamaggggacaaggatgcatttctggaggcgctcaccattttacagaaaggagtcatctgtttctcataaggtggggtg

SEQ ID NO: 1828 - DNA, 20 bp, Homo sapiens
atctgtgatcatgccactgc

SEQ ID NO: 1829 - DNA, 22 bp, Homo sapiens
cattggtaataagcagggtggt

SEQ ID NO: 1830 - DNA, 209 bp, Homo sapiens
atctgtgatcatgccactgcactccagcctgggcaacagagtgagtcacacacacacacaaacacacacacacacacacacacaataaaaataaaaaatccaaggctttattataaaatatttagtatatataacataatttgtgtaatgcatatatagtatttagaataataaaacaacattatttaccaccctgcttattaccaatg

SEQ ID NO: 1831 - DNA, 18 bp, Homo sapiens
actcgggaggcagagctt

SEQ ID NO: 1832 - DNA, 20 bp, Homo sapiens
ctacaaggcgacacgacaaa

SEQ ID NO: 1833 - DNA, 204 bp, Homo sapiens
actcgggaggcagagcttgcagtgagccgagatcgcaccgctgcactccagcctgggtgacagagcgggactctgtctcaaaacaaaacaaaacaaaacaaaacaaaacaaaaacatgctatgtagattaatcaaaagaaaaagcaaaaccttacataatcctaccatccagaaaggcagtatttttgtcgtgtcgccttgtag

SEQ ID NO: 1834 - DNA, 593 bp, Homo sapiens
gggaggctgggacaggagaatcatttgaacccaggaggcggaggttgcagtgagccgagactgagttattgcattccagcctgggcaacaagagcgagactttgtctcaaaaaaataaataaataaaattaaaaacagcttccaaaacacaaagatggcgatgtctcaggctagggggaaaaaacacaggcagagctctctatctcctagaacaccttcccctgmtcaacctctttccttccaccctcagggaggtcaagcccacctagtgactgacacagtccctgaccacctgatctgcagctctaaaacctcctcctgaggccatcggggccacaccctgtcttctcctccctcctccttcatggccaaccagcttgacggttccgtttctttgatactttctagcaaaatcctccaactaatttgcctgtcttgcatctccatctccttccatcccattctctcctgcactctcatcaggcctaagtccccatccccgctttgcagctgctgcggtcaaagctgccatgaacttcaacttgcccatctggatggtctggggtggtcctcgtcttttgggcaagtctgca

SEQ ID NO: 1835 - DNA, 255 bp, Homo sapiens
gggaggctgggacaggagaatcatttgaacccaggaggcggaggttgcagtgagccgagactgagttattgcattccagcctgggcaacaagagcgagactttgtctcaaaaaaataaataaataaaattaaaaacagcttccaaaacacaaagatggcgatgtctcaggctagggggaaaaaacacaggcagagctctctatctcctagaacaccttcccctgmtcaacctctttccttccaccctcagggagg

SEQ ID NO: 1836 - DNA, 21 bp, Homo sapiens
tgtccgacacaataggcattt

SEQ ID NO: 1837 - DNA, 23 bp, Homo sapiens
tggaaacagaatttgaacactga

SEQ ID NO: 1838 - DNA, 141 bp, Homo sapiens
tgtccgacacaataggcatttaatatatattattattatagtccttaatgggttatccttctaatatgtccaaggagatattacaacacacacacacacacacacacacacacacaaatcagtgttcaaattctgtttcca

SEQ ID NO: 1839 - DNA, 21 bp, Homo sapiens
tgtccgacacaataggcattt

SEQ ID NO: 1840 - DNA, 23 bp, Homo sapiens
tggaaacagaatttgaacactga

SEQ ID NO: 1841 - DNA, 141 bp, Homo sapiens; identical to SEQ ID NO: 1838

SEQ ID NO: 1842 - DNA, 24 bp, Homo sapiens
ccctagagggagtatctttgttca

SEQ ID NO: 1843 - DNA, 20 bp, Homo sapiens
ttgctgaattcccagcttct

SEQ ID NO: 1844 - DNA, 251 bp, Homo sapiens
ccctagagggagtatctttgttcattattcaaaaatatttattgaggggccaggtgcagcggctcacatctgtaatcccagcactttggaggccaaggcaagaggatcagttgagcccagcagttcgagaccagcttgggcaacatagtgagacactgtctatatatatatatatatatatatatatatatatatatatatatatcccttgccatgtgcttggtcctttttagaagctgggaattcagcaa

SEQ ID NO: 1845 - DNA, 21 bp, Homo sapiens
tgagagtggtgtgaagctcct

SEQ ID NO: 1846 - DNA, 20 bp, Homo sapiens
atataatggaggccgagcat

SEQ ID NO: 1847 - DNA, 420 bp, Homo sapiens
tgagagtggtgtgaagctcctagttgacaggtttgtctccattacatgcatacatacatacacacacacacacacacacacacacacacacacacacacacacatatatatgtattttttttttgagatggagtctcactcactctgttgcccaggctggagtgcagtggcatgatcttagctcaccgtatcctccacctcctgggttcaagcgattctcctgcctcagcctcccaagtagctggaatcacaggcacctgccaccatgcccagctaatttttgtatttttaatagagacggggttccatcatgttggccaggctggtcttgaactcctgacctcaagtcatccacctgcctcaccctcccaaactgctggggttacaggcatgagccaccatgctcggcctccattatat

SEQ ID NO: 1848 - DNA, 562 bp, Homo sapiens
tgagaccactgaggcagacctgtacaagaagaaccaatgaaattgggtggcacttggcacgccttcctgggttctcacacctgggcagcaggtggcacagtgcttttgggaggtgccgtacttccttgctatattggaaaaggctttgaccttagaattagaaggcctgggtcctcctctcactccgaatgtcgtagctgtggggccttgaggaactttcctggcttctctgagctcctataaaaataccccttgcacaaggttgccgggggaagaacatattgaacactttggatctcagtccctcgcctcaaggtcctgtgctaaatccagacctgtaaatatagcagtgaaggatctgcccccgcctgctgctcccagaagtactcctagtccctggtgatggttaccaggctgccgggccgtaaccaggtactccctgggccactgacagagccttctctcctctgagggcctgtgggcaatgagcagaaaagggggtgggggcctctgccccacacgcctttcctctgccctgcctggttcctggtgaatgtggctc

SEQ ID NO: 1849 - DNA, 19 bp, Homo sapiens
ggtcacccagacgaggact

SEQ ID NO: 1850 - DNA, 23 bp, Homo sapiens
tgctttcatgtactgcacttagg

SEQ ID NO: 1851 - DNA, 251 bp, Homo sapiens
ggtcacccagacgaggactcatcattgtgtagtcagcctagacttcctccagccccatcccacactacactcacacaccacacactcaggcacacacacttgcacattcccagacactcacatacatgctcactactcacacctccacacccacactcacccccatacccacactcacccccacacagacatgctcacacacattcctacacaagaacatggaaaaaccctaagtgcagtacatgaaagca

SEQ ID NO: 1852 - DNA, 18 bp, Homo sapiens
cccactttgggcctaatc

SEQ ID NO: 1853 - DNA, 20 bp, Homo sapiens
ttgtaaggtcaatgctgtgg

SEQ ID NO: 1854 - DNA, 294 bp, Homo sapiens
cccactttgggcctaatcctcccctgcctctccaccccacccccccaaccctcccctgcctctccaccccaacccctaaccctcccctgcctctctaccccacccccgcaaacctcccctgcctctccaccccacccccacaaccctcccctgcctctccaccccacccccaaccctcccctgcctctccaccccacccccgctaaccctcccctgcctctccaccccatccccctaaccctcccctgcctctccaccccaccccacccaccgcccacagcattgaccttacaa

SEQ ID NO: 1855 - DNA, 20 bp, Homo sapiens
cctgaagaggcaaagagcac

SEQ ID NO: 1856 - DNA, 20 bp, Homo sapiens
caggtctggatgtggttgag

SEQ ID NO: 1857 - DNA, 187 bp, Homo sapiens
cctgaagaggcaaagagcacatctggggtggggtgggggatctgcacagggaaaggaaccagggaaagcctctcagaacaggtgacacccacgctgggattggaaagacaagtaggattttgacggttcagaaatcatgagagactccacaaatcagtatgctttatctcaaccacatccagacctg

SEQ ID NO: 1858 - DNA, 20 bp, Homo sapiens
ctgggaccaatgaggacact

SEQ ID NO: 1859 - DNA, 22 bp, Homo sapiens
cccacaccagaataaactgaaa

SEQ ID NO: 1860 - DNA, 266 bp, Homo sapiens
ctgggaccaatgaggacactctgattgactctgttttgttttgttttgagacagagtttcgctcttgtcacccaggatggagtgcagtggtgtgatctcggctcaccgcaacctccgctttctgcgttcaaattattctcctgcctcagtctcccaagtagctggaattacaggcatgcaccaccatgcccggctaattttttgtatttttacaaaaaacccttcaaaaaacaaaaattgatcatttcagtttattctggtgtggg

SEQ ID NO: 1861 - DNA, 20 bp, Homo sapiens
gctgagcgagtgtcattgtt

SEQ ID NO: 1862 - DNA, 20 bp, Homo sapiens
atgtgtgctgccagtgtttc

SEQ ID NO: 1863 - DNA, 229 bp, Homo sapiens
gctgagcgagtgtcattgttcttattctacagaagagaaattttggagggaaagttgttttttgtttgtttgtttgttttttgtttttgtttttttaatatacaaagagctagcatggtttctttcactgggtggatgttttggataatctattcaagccagatcacatagcctggcttaatgaaacctatatcctttgcagactgacagaaacactggcagcacacat

SEQ ID NO: 1864 - DNA, 20 bp, Homo sapiens
gctgagcgagtgtcattgtt

SEQ ID NO: 1865 - DNA, 20 bp, Homo sapiens
atgtgtgctgccagtgtttc

SEQ ID NO: 1866 - DNA, 229 bp, Homo sapiens; identical to SEQ ID NO: 1863

SEQ ID NO: 1867 - DNA, 705 bp, Homo sapiens
taattatttttactgtgtatccttttgtaccttttggattttatatgtgcgcagggattaactgtttacacaaacatattaaatgatgtttgtaaatgaggtcaaggtattttcccatgtggtagaattggggttccagctccaatccttgggttccagaaccacatcctaactgtaatgctttccagcctcctagaatatgccattttccagttttaaaagctgtgaagcctagatgtcaatgtaaaacatttttatgattattaataatgccactagatagagggcctttcaagaggccatgatttgggcctgttaggagctgcttttatctaattaatggtggtacatcaggccagatcaaagcagaggggacagcatcacaggacactggagaggacagctcctttctaccccagctccttttcagcctggggtgaggtgagggatctgcacagggaaaggaaccaaggagaacctctcagaacaggtgacacccacgctgggattggagagacaggtatgattttgacttttcagaaatcatgagagactccacaaatcagtatgctttatctcaaccacatccagacctcggacaaatgaggacaccctgattgactctggttacttaaaggtgtgacgtgcttgattcaggcaaatgtagccagcccacagagacagcaggtgagaaatgattgacag

SEQ ID NO: 1868 - DNA, 21 bp, Homo sapiens
cccatggttaagtttgtgtcg

SEQ ID NO: 1869 - DNA, 21 bp, Homo sapiens
ttcccacagctgttagctcat

SEQ ID NO: 1870 - DNA, 250 bp, Homo sapiens
cccatggttaagtttgtgtcgttgttgaatttggccaaacaatttgatttaccaatttcaccccttccttactgatcacctcaagaaggggtgaaaatatgtttcaaatgcaaatatgttacttggacatgtcatcatcaacatatcatcagtcatctgtaccttggcaagtattcacttatgaaatgtaatcctcctattggaacttctttatacttctcccatatggatgagctaacagctgtgggaa

SEQ ID NO: 1871 - DNA, 22 bp, Homo sapiens
tgctttcatgtacttctcttgg

SEQ ID NO: 1872 - DNA, 19 bp, Homo sapiens
gaagatttgccaggcttcg

SEQ ID NO: 1873 - DNA, 359 bp, Homo sapiens
tgctttcatgtacttctcttggcattattattattattatttgtgacagagtcttgctccatcacccaggctggagtgcagtggcgggaacatggctcactgcagcctcgacctcctgggctcaagaaatcctcctgccacagccccccaagtagctgagactataggtgcacaccaccacactcagctaattttttttattatttatttatttatttggtttttttgtagaaacaggggtctcactttgttgcccaagctggtcttgaactcctgggctcaagtgagccttctgcttcagcctcccaaagtgatgagattacaggtgtgaaccaccgtgcgaagcctggcaaatcttc

SEQ ID NO: 1874 - DNA, 26 bp, Homo sapiens
ccttctcatgtattatttctctttca

SEQ ID NO: 1875 - DNA, 20 bp, Homo sapiens
cacagtgccttaacctctgc

SEQ ID NO: 1876 - DNA, 405 bp, Homo sapiens
ccttctcatgtattatttctctttcatgataagaaatttaagtattggccaggcgcggtggctcacgcctgtaatcccagcactttgggagactgaggtgggggcagatcacgaggtcaggagttcgagaccagcctggtcaatatggggaaaccctgactctactaaaaaaaatacaaaaattcgctgggtgtggtggtgcacacctgtagtcccagctactcaggaggctgaggcaggagaatctcttgaaccccagaggcagaggttgcagtgagccgagattgtgccactgcactccagcctgggcgacagagtaagacttcatcccaaaaaaaaaaaaaaaaaaaagaaagaaagaaagaaagaaagaaatttaagtattgcagaggttaaggcactgtg

SEQ ID NO: 1877 - DNA, 22 bp, Homo sapiens
tggaagctaggtgataaggaca

SEQ ID NO: 1878 - DNA, 21 bp, Homo sapiens
tcagagaatatggcccactta

SEQ ID NO: 1879 - DNA, 394 bp, Homo sapiens
tggaagctaggtgataaggacattaaacttcatctaatattctctccagttttttttttcttagagctcaatttctagagaattctctctacttttgtgcatatttgaatgttttcaatataaaatgctttaaagtgatcaatcatatacttaggtacaaataaaacttttgtaaaaactttaaaatagaagtttttttaatttttaattttctttctttctttctttctttctttttttaagagatggggtcttgccatgttgcctgggctggtctcaaattcctgggctcaagtaatactcccaccttaacctcccaaagtcctggggttacaggtgagagccaccacacctggcctcaaaaatagagatttaagtgggccatattctctga

SEQ ID NO: 1880 - DNA, 601 bp, Homo sapiens
ctgccatgatactgtccttaagcaaaatgtcggggacaaatagaggtagaaagtactggtgacttctccaaaaatgtcatctcttcctccctctctgcgtttatgagaacataaatagaaatgaagctcagtgttgtgaaattcagggttccttttttgccctaaatacttccaaataaagccagccacaggagctgctccacagagctaggattcaaaaaccagaagctggtgaggggaacggagtggcagcagctggagggagcccgaggcgctcccagccctgcttcccctcccagcygccagccaggcgctcacagtgacctgcccagtctgtcccaacactgcccgattcactctcacctctagcctgttgagcaggagtatggctttcactttaagaaaagccaattatgagaaatccaaacttaggaaaccataacgaggacaaagggattcacatgacatacaaatgggttctttgcaaaagacttctgatgatgcccatctgttgtgtaaaaagaggcacccttgggtgtagggatctagggtaaactctgagtgagtcctttaaaaagaaacgacttctcgtcagtagact

SEQ ID NO: 1881 - DNA, 643 bp, Homo sapiens
gaatatgcccagttgcagacccaagaagactggctcaaattgctgttcccttcttgcctgttgggtcctggtaaggtctttttcctaaactagctgtgataagcagcttatagctcatatcctgttatctttatcctagttttaaacatccctgctcaaagcaaactcaagcactttgtttctcaagcagctgcctaggttggaattctatgggccgaagctgccaagtttagcctcagtggggaaggctggtcagcgccaataggtggaacagctggcccagactgtctcattccaggtctggctgactgygggggcgagagttggcataaagatgaatttgtccttctgctcaggctggtgtccaaatcctgcaactcccccagcttgtccttctttggagagacccgtggagatgtcccaagcttggggccccactgaaccagggtgtgtggcatgtttctcatgaggctggctgagtcagcagttacatttgatctactgaccctccctctcctctcctgacttggggtccagtaggcaacctcactccctgctaagaccagcgaacatgcttgagggatcactgaggggtaggagtgtggaccctctgtctgctacacactacactgtttctgctgct

SEQ ID NO: 1882 - DNA, 442 bp, Homo sapiens
ggaattctatgggccgaagctgccaagtttagcctcagtggggaaggctggtcagcgccaataggtggaacagctggcccagactgtctcattccaggtctggctgactgygggggcgagagttggcataaagatgaatttgtccttctgctcaggctggtgtccaaatcctgcaactcccccagcttgtccttctttggagagacccgtggagatgtcccaagcttggggccccactgaaccagggtgtgtggcatgtttctcatgaggctggctgagtcagcagttacatttgatctactgaccctccctctcctctcctgacttggggtccagtaggcaacctcactccctgctaagaccagcgaacatgcttgagggatcactgaggggtaggagtgtggaccctctgtctgctacacactacactgtttctgctgct

SEQ ID NO: 1883 - DNA, 24 bp, Homo sapiens
caactcagaagtgaatcaatgaaa

SEQ ID NO: 1884 - DNA, 20 bp, Homo sapiens
tgaactttgcccgattatga

SEQ ID NO: 1885 - DNA, 403 bp, Homo sapiens
caactcagaagtgaatcaatgaaaaaccaacttcctgttacatgttaaatgtggcagccgggcgtggtggctcaagcctgtaatcctagcactttgggaggccgtggcgggtagatcacttgaggtcaggaattcgagaccagcctggccaacgtggtaaaaccctgtctctaccaaaaatacaaaaattagctgggcgtggtgacaggtgcctgtagtcccagctactcgggaggctgaggcaggagaattgcttgaacccaggaggaaaaggttgcagtgagccgagatcgcgccactgcactccagcttgggtgacaagagcgaaatcctgtctcaaaaaagaaaaaaaatacatatatatatatatggctagacatgtctcataatcgggcaaagttca

SEQ ID NO: 1886 - DNA, 20 bp, Homo sapiens
cacgcagaaccagaagcata

SEQ ID NO: 1887 - DNA, 21 bp, Homo sapiens
tttcaatacttggaccctgct

SEQ ID NO: 1888 - DNA, 241 bp, Homo sapiens
cacgcagaaccagaagcatataatgacttaaatgtacaaaaaacatctctaatccatttgccctcagtttctatgatgaagacagcaaacaaaacaaaacaaaaaaccccataaaaaccaaaaccactgggggaaataatagagagaatacttttccccccgatagcagggagaactaaggatatagaaagaaagaaaaatttggatcactttcataataagcagggtccaagtattgaaa

SEQ ID NO: 1889 - DNA, 20 bp, Homo sapiens
cacgcacatgaaacacacag

SEQ ID NO: 1890 - DNA, 20 bp, Homo sapiens
agcaaggttcagcaagccta

SEQ ID NO: 1891 - DNA, 382 bp, Homo sapiens
cacgcacatgaaacacacagcaggcatcaaataaatgctgactgcttgtcatctagagtctagttctgatcatgccattaggtatacaatggcaagccagctttcccttactagcctgccttagaatcatatatccaaaaggtacacagagaatatgagagagaaagagggagggagggagggggaagagggagagagagagaatgaatgaatgaatgaatgtgtacgcacttatctttggcccatgattatttaagtcaaaaagacattaggttggattaagagtttcctgacaaaattttcctcatctaagcattcaaagttagaactcaagggatgcatccagcccacagatatcttgttaggcttgctgaaccttgct

SEQ ID NO: 1892 - DNA, 20 bp, Homo sapiens
cacgcacatgaaacacacag

SEQ ID NO: 1893 - DNA, 20 bp, Homo sapiens
agcaaggttcagcaagccta

SEQ ID NO: 1894 - DNA, 382 bp, Homo sapiens; identical to SEQ ID NO: 1891

SEQ ID NO: 1895 - DNA, 20 bp, Homo sapiens
gcaagccagctttcccttac

SEQ ID NO: 1896 - DNA, 20 bp, Homo sapiens
gatatctgtgggctggatgc

SEQ ID NO: 1897 - DNA, 267 bp, Homo sapiens
gcaagccagctttcccttactagcctgccttagaatcatatatccaaaaggtacacagagaatatgagagagaaagagggagggagggagggggaagagggagagagagagaatgaatgaatgaatgaatgtgtacgcacttatctttggcccatgattatttaagtcaaaaagacattaggttggattaagagtttcctgacaaaattttcctcatctaagcattcaaagttagaactcaagggatgcatccagcccacagatatc

SEQ ID NO: 1898 - DNA, 24 bp, Homo sapiens
cctaaatcagtaaagaaagcagca

SEQ ID NO: 1899 - DNA, 24 bp, Homo sapiens
ccaggactattctctggaatgttt

SEQ ID NO: 1900 - DNA, 289 bp, Homo sapiens
cctaaatcagtaaagaaagcagcagggggctgggcacagtggctcatgcctatacgcccagcactttgggaggctaaggtgggacgatcacttaagcccagagtttgaggctacagtgaaccaaagtcatgccactccactccagcctgggcaagagagtgagaccctgtctcttacaaaaaaaagaaaagaaagcagcagggagaagaaaaaaacctacaatactattgctaattctttcctattctctctattcaaacgtgaaaaacattccagagaatagtcctgg

SEQ ID NO: 1901 - DNA, 20 bp, Homo sapiens
catctgctcatttccctgaa

SEQ ID NO: 1902 - DNA, 19 bp, Homo sapiens
gtggtgcctgcctgtagtc

SEQ ID NO: 1903 - DNA, 375 bp, Homo sapiens
catctgctcatttccctgaaaaagaaaggcctactgttttccttttgtgtgtgtgtatgtgacagcgtcttgctgtgttgcccatgctagagtgcagtggcacgattatggctcactgcagtctcgacctcctgggctccagtgatcctcctgcttcagcctccccaggagatggaacacaggcatgcaccacgacatgtagcttatttatttatttatttatttatttatttatttatttgacagggtcttgctctgtcacccaggctggagtgcagtggcacaatcattgctcactgcagcctcgacctcctgggctcaaatgattgccctgccttagcctcccaagtagctgggactacaggcaggcaccac

SEQ ID NO: 1904 - DNA, 21 bp, Homo sapiens
cccatgaagcttacattccat

SEQ ID NO: 1905 - DNA, 23 bp, Homo sapiens
gctaacctgctgtttaattttcc

SEQ ID NO: 1906 - DNA, 158 bp, Homo sapiens
cccatgaagcttacattccattaatgggaagaggaaaatattacagacatatataatgtgggtagagcaaaaaaaagttaaacaaaaaataacatatatatatataatgtgtccagtggtgacaaatattacagaggaaaattaaacagcaggttagc

SEQ ID NO: 1907 - DNA, 20 bp, Homo sapiens
catgaccaccaccaagaaca

SEQ ID NO: 1908 - DNA, 20 bp, Homo sapiens
tatggaaggagcctttggag

SEQ ID NO: 1909 - DNA, 260 bp, Homo sapiens
catgaccaccaccaagaacaacactgaaaaagattactgactggtatttgtcactgtctcactgacccaaatgtcctctgtcaatccattgacctttatagaaaatgtgtgtgtgtgtgtatgtgtgtgtttgtggtgcgtgcttacacaggatttgatcttctccaacatctgttgatgaagaaggaaacatatcaatcagttactattcattgagtactgatcaacttacccagttctctccaaaggctccttccata

SEQ ID NO: 1910 - DNA, 486 bp, Homo sapiens
tcaaaaaattgaacaatagaaacttgtttataatcgataatttgtcaatcataatcatttcattacttaattttgaatttttaatctgttcacaaagaatttttatattctatatagcatgataataagtattaaagacaattcttaaatttaaatgcagagcaagcagtgcaacaattagaaaakgaaaatgacttgttttcctttacaattccccacaagtttatatgtagctttaaaatatactttggttaatatatagaacttcatttatctagtttcactaaagagtactatgttctggttcacctaatattcttctgcagtttcataagattcacattttttaaaaagtttcacacagtatggttctaaataatttcttttgatgactcagaaggtactttcaacattatagtgaaccaggatggccatgaacattaacaagtatatacagtactaatttttaaaggttgttgggggtgg

SEQ ID NO: 1911 - DNA, 255 bp, Homo sapiens
tcaaaaaattgaacaatagaaacttgtttataatcgataatttgtcaatcataatcatttcattacttaattttgaatttttaatctgttcacaaagaatttttatattctatatagcatgataataagtattaaagacaattcttaaatttaaatgcagagcaagcagtgcaacaattagaaaakgaaaatgacttgttttcctttacaattccccacaagtttatatgtagctttaaaatatactttggttaa

SEQ ID NO: 1912 - DNA, 17 bp, Homo sapiens
gctgagattgcaccacg

SEQ ID NO: 1913 - DNA, 18 bp, Homo sapiens
gccccttgagatcaggtt

SEQ ID NO: 1914 - DNA, 230 bp, Homo sapiens
  misc_feature 20, 110, 118, 140, 152, 198, 211: n = A,T,C or G
agctgagattgcaccacggnactccagcctggcaacagagtgggactctgtctcaacacacacacacacacacacacacacacacacacacacacacacacacacaactnacaaagcnaaaacaggctccatcgagattnacatggctcttnacatttgtctacccatgaaacctgatctcaaggggcaagcagcagnacagcattaaatnagataaacaatagtaagct

SEQ ID NO: 1915 - DNA, 30 bp, Homo sapiens
agctgtacaaaagcactttccttctttata

SEQ ID NO: 1916 - DNA, 30 bp, Homo sapiens
ccacgtgtattatcgaccctgaagatgtta

SEQ ID NO: 1917 - DNA, 216 bp, Homo sapiens
agctgtacaaaagcactttccttctttatatccttattctttttttttttttttactttttaaactttttattttgttaaaaacaaagacacacacacacacacacacacacacacatattagcctagacctacacagggtcaggctcatcaatatcactatcttctaccttcacatctgttctactaacatcttcagggtcgataatacacgtgg

SEQ ID NO: 1918 - DNA, 20 bp, Homo sapiens
actgtcggcctacctggttt

SEQ ID NO: 1919 - DNA, 25 bp, Homo sapiens
tttacctattctgggtatttcacac

SEQ ID NO: 1920 - DNA, 239 bp, Homo sapiens
actgtcggcctacctggttttgaggctttcagacttgaactgaccactctactggcttttcccattcttcagcttgcacatagcctatcattcacctttgtaatggtatgagccaattttccctaataaactgtcatatatatatatatatatatatatatatatatctcctattggttctgttcctctggagaaccctgaataattatacatagtgtgaaatacccagaataggtaaa

SEQ ID NO: 1921 - DNA, 20 bp, Homo sapiens
actgtcggcctacctggttt

SEQ ID NO: 1922 - DNA, 25 bp, Homo sapiens
tttacctattctgggtatttcacac

SEQ ID NO: 1923 - DNA, 239 bp, Homo sapiens; identical to SEQ ID NO: 1920

SEQ ID NO: 1924 - DNA, 20 bp, Homo sapiens
tttcccattcttcagcttgc

SEQ ID NO: 1925 - DNA, 25 bp, Homo sapiens
tttacctattctgggtatttcacac

SEQ ID NO: 1926 - DNA, 182 bp, Homo sapiens
tttcccattcttcagcttgcacatagcctatcattcacctttgtaatggtatgagccaattttccctaataaactgtcatatatatatatatatatatatatatatatatctcctattggttctgttcctctggagaaccctgaataattatacatagtgtgaaatacccagaataggtaaa

SEQ ID NO: 1927 - DNA, 23 bp, Homo sapiens
gaatgtacagggaccctatgtga

SEQ ID NO: 1928 - DNA, 19 bp, Homo sapiens
cttcccctttcccctgttt

SEQ ID NO: 1929 - DNA, 164 bp, Homo sapiens
gaatgtacagggaccctatgtgatttagtaagagagggaactgggtgtggtggctcatgcctataattccatctactcgggaggctgaggcctaggcaacatagtgagatcctgtctctaaaaataaaaactaaaaaaaagaaaaaaacaggggaaaggggaag

SEQ ID NO: 1930 - DNA, 20 bp, Homo sapiens
gggaaaggggaaggatgata

SEQ ID NO: 1931 - DNA, 20 bp, Homo sapiens
gccatcggagtattgaccat

SEQ ID NO: 1932 - DNA, 196 bp, Homo sapiens
gggaaaggggaaggatgatatatatgtatacacacacacacacacacacacacacacacacacaaataacacacaagttatttcacctctctgtgccttgattttcttaaaataagaataatagaagctacctcatagggttatcataaggattaaatgaggtaattattcatatgatggtcaatactccgatggc

SEQ ID NO: 1933 - DNA, 21 bp, Homo sapiens
aagcattcagaatagggctga

SEQ ID NO: 1934 - DNA, 22 bp, Homo sapiens
aaagacaaacagagcaagatcc

SEQ ID NO: 1935 - DNA, 132 bp, Homo sapiens
aagcattcagaatagggctgatcacttaataagcccccaataaatgtttgttaatatttctatcctcatggtcttttaaaaatgtttctttctttctttcttttgagacaggatcttgctctgtttgtcttt

SEQ ID NO: 1936 - DNA, 21 bp, Homo sapiens
gccattccaattgtaccctaa

SEQ ID NO: 1937 - DNA, 22 bp, Homo sapiens
cctgtatttcattgagctgtgg

SEQ ID NO: 1938 - DNA, 374 bp, Homo sapiens
gccattccaattgtaccctaacacaacacttttcaaacaggagccatctgtgggtcaggacattcatctgcgttatggccagcataatctttaaaaatgaaatcgaatagaataaaaaaaaaccagagtgtgccacaaataggaaggttaagtattgtttcaaatatgtgtgtgtgtctgtgtgtgtttctgtgtaccagactgcaatgtgaaaagttttctgccaaagagaaataaagaaaaagacaggtgaagaaaagcaaaaaaaagagaagagagaaaagacacacactatcctaatatataatactgctgtaatgcagaaaagacaagctatgagaaaccagtaattccacagctcaatgaaatacagg

SEQ ID NO: 1939 - DNA, 20 bp, Homo sapiens
ccaaggaatgagcattgaca

SEQ ID NO: 1940 - DNA, 20 bp, Homo sapiens
tgaataatggcagtggctgt

SEQ ID NO: 1941 - DNA, 283 bp, Homo sapiens
ccaaggaatgagcattgacagtatgcttatactcgcatatctatgcattgacagtatgcttatactcgcatatctatgcttgtatttgcatagccctatctagatggctataaaagaagctgtttatagtgccaactataactggtaggctggtgttgggagactttttatggtggtaaaatatatatatatacatgtaacttaccattttacccattttcaagtgtacaattcagtggcattaagtacatttgtgctgttgtacagccactgccattattca

SEQ ID NO: 1942 - DNA, 20 bp, Homo sapiens
ctgggcgacgtagagaaatc

SEQ ID NO: 1943 - DNA, 20 bp, Homo sapiens
gcccggagaagaattttcag

SEQ ID NO: 1944 - DNA, 287 bp, Homo sapiens
ctgggcgacgtagagaaatctcgtctctactaaaactacaaaaaattagctgggcatggtggtgcacacctataatctcagctacttgggaagctgaggcacgagaatctcttgaacccgggaggcggaggttgcagtgagtcaagatagcgccattgcactccagcctgggcgacagaatgagactctgtctaaaaaaaaaagagagagagagagagaagacagagaaagacattctacagccatatacctgaaaaactacaatccctgaaaattcttctccgggc

SEQ ID NO: 1945 - DNA, 401 bp, Homo sapiens
cagttacacctccctttatgatactgtgtgtgtgaaaaagtgcttccaaatgacttactagcactctctgagcaaatcagcccatattaggtttacactttcttccaaaaagcactttattctgaagcacagtattcatctgtggcccagacaggtattttctccccatgtataactatatgaggaaagacacctatttgytgactgaaattcagtcaaatgtaatcattcagcatgacttgggcagatattaaactcaaattacaggttcagtaaatacacatatattgtttttacttttaactgggctaacagacaagagaaaccaacttgataactagagtatacctactcctaatcagactaaagtagggagttaaacccagtgggagttagtcaca

SEQ ID NO: 1946 - DNA, 255 bp, Homo sapiens
cagttacacctccctttatgatactgtgtgtgtgaaaaagtgcttccaaatgacttactagcactctctgagcaaatcagcccatattaggtttacactttcttccaaaaagcactttattctgaagcacagtattcatctgtggcccagacaggtattttctccccatgtataactatatgaggaaagacacctatttgytgactgaaattcagtcaaatgtaatcattcagcatgacttgggcagatattaaa

SEQ ID NO: 1947 - DNA, 625 bp, Homo sapiens
aagccctttacaacatataaaaaggcggagtaacaatccaagtcaaatgcacatagagatacattctgattggtcatccaatcagagccctaaaagatgttcattttcttcgcaaaaaaaaaaaaaaaaaaactttaaacaaacatataaaggaccccattctaagaaaaaggaaaagcataagaggaggcaatgagagcaatttagagtactagatgcaaccaaagacctaaagggtaaacccaagatatcccctaaatatgcgtactactrtaacctcattgatgttgttaggatctcttgtaagtggcacttcaaatacaatgttgttccccatccctcaaaggactaacacacataaatattctaagaagagactacaatcatcaagtataagctagtctttataaaaagtaatgttaacgggctgggtggggtggctcacacctgtaatcccaggactttgggaggctgaggtgggcaaatcatgaggtcaggagtttgagaccagcctggccaacatggtgaaaccccgtttctactaaaaatacaaaaattagccaggtgtggaggcacgcacatgtaatcccagctactcaggaggctgaggcaggagacttgcttg

SEQ ID NO: 1948 - DNA, 1001 bp, Homo sapiens
gctcatgctatttgaaaaacttctaaaggtacttttcctatatttagtcataagcacacaaaaaagataataatctctcactataactcaaaacttcatacttatgggttattctgctagctctataagttccaatgccttaaacttcgattcaggggaaataatatagccactctcattccaaagagccaaatctttgtttttgtttactgctaagatgacttgcacaagccctttacaacatataaaaaggcggagtaacaatccaagtcaaatgcacatagagatacattctgattggtcatccaatcagagccctaaaagatgttcattttcttcgcaaaaaaaaaaaaaaaaaaactttaaacaaacatataaaggaccccattctaagaaaaaggaaaagcataagaggaggcaatgagagcaatttagagtactagatgcaaccaaagacctaaagggtaaacccaagatatcccctaaatatgcgtactactrtaacctcattgatgttgttaggatctcttgtaagtggcacttcaaatacaatgttgttccccatccctcaaaggactaacacacataaatattctaagaagagactacaatcatcaagtataagctagtctttataaaaagtaatgttaacgggctgggtggggtggctcacacctgtaatcccaggactttgggaggctgaggtgggcaaatcatgaggtcaggagtttgagaccagcctggccaacatggtgaaaccccgtttctactaaaaatacaaaaattagccaggtgtggaggcacgcacatgtaatcccagctactcaggaggctgaggcaggagacttgcttgaacccaggaggcggaggttgcagtgagccgagatcccgccactgcactccagcctgggcgacagagcaagactccattgcccccaccgcccaaaaaaaaagtaatgttcactcaaaatcaagttcataaagcaccttcacatataaca

SEQ ID NO: 1949 - DNA, 509 bp, Homo sapiens
atttaattgggttcggtgagctcctcttaaaggtctcgagtggggagcactgaggttggacagctgttaaccagcagctgcgctccaggccagaagtggctgcacttcagtaggatgggagtcaccgcgttgaccctagtgggtgttaaatgctttggaattctaccagatacagttaaaagtccccttttcgatgtattrtagtacttttcctggaagctatcctctgtcattaagtggtaataagctactgaaataggcacttgtcagttttgccctttcaagttagcaggaattacatcctctggaccagagatggcacaggagcagttgagtagaatcatcattgaaagatgggctgtacatctctgatctggggaaaataataataattttttttaaaaaaaaagatcggctgaacatggaagaggtttacccgtcaaacaaaattatttacttctactttttgttcagtgacaatacgattaatcgtactaataacaaatatg

SEQ ID NO: 1950 - DNA, 255 bp, Homo sapiens
atttaattgggttcggtgagctcctcttaaaggtctcgagtggggagcactgaggttggacagctgttaaccagcagctgcgctccaggccagaagtggctgcacttcagtaggatgggagtcaccgcgttgaccctagtgggtgttaaatgctttggaattctaccagatacagttaaaagtccccttttcgatgtattrtagtacttttcctggaagctatcctctgtcattaagtggtaataagctactgaa

SEQ ID NO: 1951 - DNA, 18 bp, Homo sapiens
agcacgtggcaagagagc

SEQ ID NO: 1952 - DNA, 20 bp, Homo sapiens
catgcaggcaagaaggaaac

SEQ ID NO: 1953 - DNA, 390 bp, Homo sapiens
agcacgtggcaagagagcccctaatataaatgtaagtgcatctgcatgtgtgttggtgtgtgtgtgtttgttgcattatgtttattttatttacttatttattttttaagagacagggtcttgctatgttgctcagactgctgcagaactcctggcctcaagtgattcttccatctcagcctcctgagtagctagtattacaggtgccagccaccctgcctggctatattttatacatatatttatgtatattactttatatatacatatatgtaattatatagtatatgtatttatttgtgtgtgtgaatatatagatagatgtatgtgtgaaacatatttatatacagacatacacacatatgtatatgtttccttcttgcctgcatg

SEQ ID NO: 1954 - DNA, 20 bp, Homo sapiens
cagactggagtgcaatggtg

SEQ ID NO: 1955 - DNA, 24 bp, Homo sapiens
ccaggtaaagaacctagaccagaa

SEQ ID NO: 1956 - DNA, 343 bp, Homo sapiens
cagactggagtgcaatggtgcgaccttggccattcctcggcaaccttcacctctaggacccaagcgattctcctgcttcagccccctgagtagcccatgcccagctaatctgtgtgtgtgtgtgtgtgtgtgtgtatgtgtgtatatatatatatattttgtagagacagggtttcaccgtattgcctaggctggtctccaactcctgagctcaagtgattcatccgccttggcctcccagagtgctaggattataggtgtgagccaccatgtttgttctgcacttactattttctttatcttccacaagaacctttttttctggtctaggttctttacctgg

SEQ ID NO: 1957 - DNA, 20 bp, Homo sapiens
cagactggagtgcaatggtg

SEQ ID NO: 1958 - DNA, 24 bp, Homo sapiens
ccaggtaaagaacctagaccagaa

SEQ ID NO: 1959 - DNA, 343 bp, Homo sapiens; identical to SEQ ID NO: 1956

SEQ ID NO: 1960 - DNA, 20 bp, Homo sapiens
aacaatcggtggttggagtt

SEQ ID NO: 1961 - DNA, 24 bp, Homo sapiens
tcacttgaaggatgtctactttcc

SEQ ID NO: 1962 - DNA, 379 bp, Homo sapiens
aacaatcggtggttggagttaaactagaggaaagtaggccgggcgccatggctcacacctgtaatcccagcactttgggaggccaaggtgggtgaatcacctgaggtcagtagtttgagagacaaggctggccaacatggcaaaaccctgtctctactaaaaatacaaaaattagctgggcgtggtggtgcgcacctgtaatcccagctactcaggaggctgaggcaggagaatcgcttgaacctgggaggaagaggttgcagtgagccgagatcgcgccactgcactacagcctgggcgacagagtgagactccttctcaaaagaaagaaagaaagaaagaaaaagaaactagaggaaagtagacatccttcaagtga

SEQ ID NO: 1963 - DNA, 22 bp, Homo sapiens
gttctggaggtttctcccttca

SEQ ID NO: 1964 - DNA, 22 bp, Homo sapiens
cacccccgtacacggtaatatc

SEQ ID NO: 1965 - DNA, 1579 bp, Homo sapiens
aattgctaataaagactgattggatgaacgatttaatatataaacaaaaagtattgtggttatcgctataaaagatggcataggttgggcattcacgcctgtaatcccagcactttgggaggccgagttgtgaggttcgcttgagcccaggagttcgagaccagcctaggcaatgtagggagacagtatctacaaaaaaaaaaaaaaaaaaaaaaaaggagggtacataaaattattatagtggctataggataatgtgcactgctaatgaagactacattatttaaatacagtgtctttccttctatttactgttatcgtttagcagaaaaacagtacgcaggatactaaagaaggaaaattcgatgtcccatattacatttgtgagagttctggaggtttctcccttcaaagccaaaaccaaaacacaaacataccatcccagtaacaaatgcgtcacttttctgaagaagacgttaagcccttccaattttaacagatcctttgttcaacagaggagagagactgggtaggcatcacctgccccagtagcttccgtacaaaatggcgttgcccgttcccacacgccagctgggattacgtcctccaggcctgtcgcaggaacggaagtggttacggccctagtgaatccgggtgggtgcgcgcaggcggccgcacaggttccaggtctttaacgtgagcccgctgcaggtgtgcggcccagtccgagacagcaggtaagtgaggctcagaagccggcgaagccttgcaccaggattgtgcgcggggcagggggtgcttccagtgcagactaagaggggtcgtggagcggggggatattaccgtgtacgggggtgacattgcggggcccccgctgtcccggagcgagttggccctgcccctctccccgcccctcggcgtgaccccctcgcccccgtcgcacacggcggggcggttcagcacccaggtgcgcaaggagggcctcacccctgcccgcggcctcccacgccctccttgggcctctcctttcgacccccttaccctctccctgggagactctaccagaccttcgaggctgcgtgtcccagtcagctaaaaaggaggccccgcccgcggcacctggtagctcctcgggcgctgcgggttcgacgcggcaacagctgctgttttctctcctggattcgtgtgagccgccaccctcgctaccatccctgtcctcccagaccacaccctgctctgggccttgccgggagccacctctttggcttttcacatccctgggatggatcaaaactaagaaccttaatcattatttattacaaaattgacatctgctccttaaaatacaaacaaaccaatcccccgataagcttttgatatgattccaacattcaaactcctttatataccctctcctcaaaaacacaaaattgaaattatactttattttcttagttctgttccaaggatagaaggaattgaaaggttttgttaatcataggaattaggaagtgcgggttggggcgcagcggggaagatggattaaatttggtcaagttgagcttgttttaaaaatgta

SEQ ID NO: 1966 - DNA, 2001 bp, Homo sapiens
attgacatttgagttgtttccacttttgggctattatgaatagctatgaactttagtacggacatgtgttttcatttcccttgggtatatacctgccagtggcattgctaggttatataactgccagactgtgttccagagcagctgtaccatttgacattcccaccaacaatgcatgagatttctaatttctccacattattgccagcactttttttttttttttttgagagacagggtcttactctgttgaccaggctggagtgcagtggagtgatcaaagcttactgcagcctcaaactcctgaactcaagcaatcctcctgcctcagcctcccaagtagctaagtctataggcacactaccactcctggccaattaattttttttttttttgaggcagggtctcactatgttgcccaggctagtctcaaattcctggcgtcaagtgatcctcccaccttggatcagagtgctggaattacaggtgtgcaccaccatacttggccttatttgtttttttgaatagaaccatcctacttggtgtaaagtggtatctgattgtggtttggatttgcatttccctaacagctcatgatattgaacatcttttcaagtgcttattggccatttgtataccctctatcaggaaatgtctattcagttagctggacttgtctgttcagttagcacacttgtagtcaagaggctgaggcagaaggatcacttgagcccaggagtttgaggctgtcgtgagctgtgattgcatcactgcactgcagcctgggcaacagagccagatctcgtctctaaaaaatatattaaaaaataaagaacagaaatacctattcagattcttagccagtttttaaattggtctgtctttttattatttggtggtaagagatttttgtgtattctagatacacacccttcccaaatatatgatttgtaaatattttttcccattctgtgggttgtcttttcgctgtctcgatggtcgattcattcttttttttttataatttcaacttttattttaaattcagggtggtacatgtgcaggtttgttacatgggtaacatgttatgctggagtttggggtatggatgagtccttcactcaggtattgggtataggtcgtttttcagcctgcggcccccttccctgtcttcccctcccctctggtagtccccagtgtctgttgttcccgtctttatgtccatgtgtactgggtgtttagctgcacttacaagtgagaacacgcagtatttggttttctgttcctgcattaattcactcaggtcgtggcctccagctgatccatgttgctgcatccatttttctcatctgcacacagtcaattcattcttttaaaaagttttttaaaatgaagtttgtattgaatttacatattattttgagtatttctataaaacaatcttttcttcttatcaaaaataggataattatagtacctcccacatagggttattgaaaggattaaatgaatactttaatatgagtatatatgtacatgtaaagtgcctggcacatgattggtcctgtttgacagctgctatcatacatctccactcttctggtcttcttctagatcttcactaaagttttctgttcctctttgtattgatctgacacatttcttgttgaattctttcctagacttgtgtatgtgattatgtggtttttttatgtagttttaaaatagtgtacaggtatattgctattatgaatgagatttcttttttcacatttttataataggtttggaaagctattgattttatactcatcagactttctgaattaccatataatttctaaaagttggttgatgactttgttgtttttccaggtggttgtgatgcagtcattctgttcaggagctgtggttctttttcattctacattcctctgccataattcgagtattctttgcctctccgctctgctttatgagcttctaacaggtctctctgcc

SEQ ID NO: 1967 - DNA, 22 bp, Homo sapiens
tgacccaacaatgagattctgt

SEQ ID NO: 1968 - DNA, 20 bp, Homo sapiens
gatgggagaatcacctgagc

SEQ ID NO: 1969 - DNA, 239 bp, Homo sapiens
tgacccaacaatgagattctgttacttaaaaatgtatcatttcatacagcattaatataggatccagctgctgggaagtaatagtatcactgtagcctgcatcagttagaccgtgtctcaagtttgtttgtttgtttgtttgaggcagggtctcactcctgttgcctaggctggacagcagtggtgtgatcacagctcacttcagtcttgacttcccaggctcaggtgattctcccatc

SEQ ID NO: 1970 - DNA, 22 bp, Homo sapiens
ggtgatgaactcggttactgga

SEQ ID NO: 1971 - DNA, 22 bp, Homo sapiens
gcaatcccacttgacaaaacac

SEQ ID NO: 1972 - DNA, 1588 bp, Homo sapiens
ggctagttttttgtaatttttttttttttttaagtagagatgggatttcaccatgttgccctaggtagtcttgaactcctgggctcaagcagtccgcctacctcagcctcccaaagtgctgggattacaggcctgagccatcatgcctggcttcaagtattgcgtatagacctgaatgccacatttgaagagatacattaacaaacttgggtctgtgcagaaggccttggccaggagagtctataaaccaggtcacaggaagactataaggggagtctcagagctctcttcacctatttaacaggctttaaggagggagtaaacacttgtcattgcagaggctgtcaaagagggcaatttgtaagcaggaaacttttatagaacgcaaggactttcaacaaaaactgcctctgaaggtgatgaactcggttactggaagtattcagtcagagactaggtcatgatctgttgggattatcatggaaaggattcttgaattgggtgggagctgaacttgactccaaaattttaactctgattttttgatttcctttaatagaagttctgtggttttgtagtaatagctaacatttatagaatcctaatgttctagccaatatactaggtgaattttatttatcattttacttaagcctcacagtaatcctacataatggtattcctatttcacagatgaggagactgtccttcctgtttcgcagatgaggaaactgaggcttagagaagtttggcaaattggctaagttcctacagctagtgagtaacagaggctggatttaagcctacgctatttgatgttaggtcttgtgttgtctaccatatactgcatttcaaacactttatacataatcatttaactcattaaagtgtgatttattccaagaatatgattctgtgttttgtcaagtgggattgcctatctctaaagagcaccagtttaaaaagagtgtatttttctaattacaaatatgtacatattcgtataaaatttgaaaaataaaaattgttaataatcctactatcattaggtagccgttgatatttagccaggcataaggctcacacctataacccgagcactttgggaaggtgaggcaggaggatcacttgagcctaggagtttgagaccagcctgggcaatatagtgtgacccgcatctctacaagaaatcaaaaaatgtgctgagcatggtggcatgcacctgtacccccagctactcaggaggctgaagtgggagcccaggaggtcgaggctgcagtgagccgtgattgtgctgcagtctagtctgggcaacagagtgaaactctgtcttaaaaaaaaaagttttatgttcagttaatttatataaaaaacttaagaatgacagattgtttcactgatgagatttagtgagggatcgaaaagcttggatcccagagtaaactgttaccacagtttaatttttttctgactcccaacccagtactgaaccatactacctctttataacatcaaggctcgataaggttaaaaaacttttttcatttcaataaacagaatgttgtaatctggtgattgaattagagac

SEQ ID NO: 1973 - DNA, 20 bp, Homo sapiens
tttctgactcccaacccagt

SEQ ID NO: 1974 - DNA, 22 bp, Homo sapiens
tgtgtgactgttggttcattca

SEQ ID NO: 1975 - DNA, 296 bp, Homo sapiens
tttctgactcccaacccagtactgaaccatactacctctttataacatcaaggctcgataaggttaaaaaacttttttcatttcaataaacagaatgttgtaatctggtgattgaattagagacatttatcatacaaatgttaacatataataccttgagctgaatttcattcattcagtaaatatttactgagtatcatcagctccctgctagtcactggggataatggtggtaacaaagccagttaaggttcctgttctcatggacagacaatgaatgaaccaacagtcacaca

SEQ ID NO: 1976 - DNA, 22 bp, Homo sapiens
tttgtttgatggctctatgcac

SEQ ID NO: 1977 - DNA, 20 bp, Homo sapiens
ttctattggaaccaggcaga

SEQ ID NO: 1978 - DNA, 172 bp, Homo sapiens
tttgtttgatggctctatgcactatttttattggctttaggattttgttttgttgtgattcattgtgagaccccttctagggactgatcttccatggtagtcctgtatgtttcctatgtggggtgtgtttgtgtgtgtgtgttatgatagactctgcctggttccaatagaa

SEQ ID NO: 1979 - DNA, 22 bp, Homo sapiens
ccttctagggactgatcttcca

SEQ ID NO: 1980 - DNA, 20 bp, Homo sapiens
agggaaccctaagccaagaa

SEQ ID NO: 1981 - DNA, 151 bp, Homo sapiens
ccttctagggactgatcttccatggtagtcctgtatgtttcctatgtggggtgtgtttgtgtgtgtgtgttatgatagactctgcctggttccaatagaatttaccagttctgaaccagtgtaaattcaatttcttggcttagggttccct

SEQ ID NO: 1982 - DNA, 20 bp, Homo sapiens
gctggcatgagttctggtct

SEQ ID NO: 1983 - DNA, 20 bp, Homo sapiens
ccagaaagggaggaggaaac

SEQ ID NO: 1984 - DNA, 410 bp, Homo sapiens
gctggcatgagttctggtctctgcccagcttcatctcccacccacccactttttttttttttttttttttttttttttttgagatagggtctcactctctcacccaggctagagtgcagtgggtgcagtggcacaccatcacagcttcctgtagccttgacctccccggctcaagctatcctcccacctcaggccccccaagtagctgatacttaaggcatgtgccaccacgcccagctaattttttatatttttggtgtagatggggtttcaccatgttgcccaggctgatctcaaactcctaggctcaagccgtccacctgcctcggcctcccaaagtgctgggattacaggcatgagccactgcgcccagccttccacccacttggggtttcctcctccctttctgg

SEQ ID NO: 1985 - DNA, 19 bp, Homo sapiens
gggtttcctcctccctttc

SEQ ID NO: 1986 - DNA, 24 bp, Homo sapiens
tttattccagaaactgtgctaaga

SEQ ID NO: 1987 - DNA, 268 bp, Homo sapiens
gggtttcctcctccctttctggcacctgatgatttctttctttcttttgggggcttaactgtgttttacatttttatcttttcagtggtttctccagcatttgcattgtttagagtggaaaagggaaggacttttatgtcttctcagattaccttaatcagcagtttctctacacaagttatttaatctcattaagcttcagtttcctcttcaataaaagcactggagaaaatacatatgaaattcttagcacagtttctggaataaa

SEQ ID NO: 1988 - DNA, 23 bp, Homo sapiens
ggtgaggatggagatagagatgg

SEQ ID NO: 1989 - DNA, 22 bp, Homo sapiens
agctctctactgcccagcactt

SEQ ID NO: 1990 - DNA, 508 bp, Homo sapiens
tcagagggcagggagatttcctggggtgaggatggagatagagatggaatacagagattataaagatgaagaaattaaaccattgctactatttcacatggaaatttatagcagttgttttagtttgtgggcacagagattataaatggggcattttttagaggaaaacttgtttatgtaaaggtttatattctgtatataaatatatttttgccatttgttttgcagattgtgggattagtgatatgcttttctaaagagtagaaaagtcgaagatgtctagacagaacttagtggctttgacagtgactacccttctgggtgtggctgtaggggggtttgtcctctggaaaggcatccagcgccgccgaaggagtaaaacgagtcctgtgacccaacagccacagcagaaagtgctgggcagtagagagctgccccctccagaagatgatcagctgcactccagtgcccccagatcctcgtggaaggaacggatccttaaagcaaa

SEQ ID NO: 1991 - DNA, 22 bp, Homo sapiens
gtttgtcctctggaaaggcatc

SEQ ID NO: 1992 - DNA, 27 bp, Homo sapiens
tgagaacaagctaattcattctccttt

SEQ ID NO: 1993 - DNA, 517 bp, Homo sapiens
agacagaacttagtggctttgacagtgactacccttctgggtgtggctgtaggggggtttgtcctctggaaaggcatccagcgccgccgaaggagtaaaacgagtcctgtgacccaacagccacagcagaaagtgctgggcagtagagagctgccccctccagaagatgatcagctgcactccagtgcccccagatcctcgtggaaggaacggatccttaaagcaaaggtggtgacggtgtctcaggaggcagagtgggatcaaatcgagcccttgcttagaagtgaattagaagattttccagtacttggaattgactgtgagtgggtaagttaaaaagcaaaagttaaaaaaaaaaaaaaaaaacaacttctgcttttccaactgggaccttggacagtcaagtagaaaataaggttaaaggagaatgaattagcttgttctcaacttgcttataagcagattttagcagaagaagaagctgctgttcctctcaggatggcggagtgcttacaat

SEQ ID NO: 1994 - DNA, 20 bp, Homo sapiens
gatggcggagtgcttacaat

SEQ ID NO: 1995 - DNA, 20 bp, Homo sapiens
tttctccacggcatccttat

SEQ ID NO: 1996 - DNA, 299 bp, Homo sapiens
gatggcggagtgcttacaattatggattacaattatgtcaaacctatatgaattgtattttccccacttatcattccgtgaacttggacaagctatttagcctctctaagtctttgtttgtttggttgtttgtaataggaacgtcatggtacctacctccagtggcttttctaaggattcaaatagatcacccccataaaggattcagcacagtgtgaacatatagtagtaagtgttcatgaaatattagccactgttaatatttgtagtagcattttcataaggatgccgtggagaaa

SEQ ID NO: 1997 - DNA, 22 bp, Homo sapiens
tggcggagtgcttacaattatg

SEQ ID NO: 1998 - DNA, 27 bp, Homo sapiens
catggcttagagtaaatgatgtttcaa

SEQ ID NO: 1999 - DNA, 422 bp, Homo sapiens
tggcggagtgcttacaattatggattacaattatgtcaaacctatatgaattgtattttccccacttatcattccgtgaacttggacaagctatttagcctctctaagtctttgtttgtttggttgtttgtaataggaacgtcatggtacctacctccagtggcttttctaaggattcaaatagatcacccccataaaggattcagcacagtgtgaacatatagtagtaagtgttcatgaaatattagccactgttaatatttgtagtagcattttcataaggatgccgtggagaaaatagctaaggaattctatttaaatggaaattattacttaggattttaaaagataacagttaacatttgaaacatcatttactctaagccatgtactatatgttttgcttgcatcatctaattttc

SEQ ID NO: 2000 - DNA, 20 bp, Homo sapiens
gcatgcctccctcatcacta

SEQ ID NO: 2001 - DNA, 18 bp, Homo sapiens
gtgatccacccaccttgg

SEQ ID NO: 2002 - DNA, 303 bp, Homo sapiens
gcatgcctccctcatcactatagtttaattttacctgttttttaaatttagtataaatgaatcatcgagtatgtgctcttttttgtcttgcttctttttccaaacattgtgagatttacctgtgttgggtgtgactatgatttgttgccatatagtgttccatggtataaatataccatgacttatttttccattctattattgatggacatttatatatatatataaaatacagtatagtccgggcgtggtggctaacacctgtaatctcagcactttgggaggccaaggtgggtggatcac

SEQ ID NO: 2003 - DNA, 20 bp, Homo sapiens
ggtgtggtgatgcatacagg

SEQ ID NO: 2004 - DNA, 20 bp, Homo sapiens
tcaattgcaccattctttgc

SEQ ID NO: 2005 - DNA, 243 bp, Homo sapiens
ggtgtggtgatgcatacaggtataatcccagttacttgggaggctgaggcagaagaattgctggaacccaggaggcagaggttgcagtgagctgagagtgtgccactgcactccagcctgggtgacacagcgagactccatctcaaaaatatatgtgtgtgtgtgtgtgtgtgtgtgtgtgtgtgtgtataatacaatatatcatttacatttgggggctcttgcaaagaatggtgcaattga

SEQ ID NO: 2006 - DNA, 22 bp, Homo sapiens
ttggatcttaagcacaatccag

SEQ ID NO: 2007 - DNA, 23 bp, Homo sapiens
cagtcaggtctcattgtctacca

SEQ ID NO: 2008 - DNA, 156 bp, Homo sapiens
ttggatcttaagcacaatccagaaacattaaagacaactcaatttacctatctgtctatttatctagttatttatttaatgtattttatcttttctttttactcaccactgtattaacaaggaaattaatgtatggtagacaatgagacctgactg

SEQ ID NO: 2009 - DNA, 22 bp, Homo sapiens
aaccaaaacctggtcagatgct

SEQ ID NO: 2010 - DNA, 23 bp, Homo sapiens
gaagcctctaggctcctatacaa

SEQ ID NO: 2011 - DNA, 1879 bp, Homo sapiens
agaaaatgctgagaaagcacttggtgctacctggatttattatattatcaggtaccacttatttacagtactctatcttctacctctttttaaaaattggatcttgagtcagtgatgataaggtaaatgactagagttacctgcgtgtacattagagaggctggataatgaaaagaggatgtttatcatttctcactctactcctgggccttttttccttagcctttttttttttttttttttttttgagacagagtttcactcttgtcgttcaggctggagtgcagtggcgcaatctcggctcactgcaacctctgcctcccgggttcaagcaattctcctgcctcaggctcccatgtagctgggattacaggcacatgccaccatgcccagctaatttttataattttggtagagacggggtttcaccatgttggccaagcttgtcttgaactcctgacctcaggtgatccgcccgccttggcctcccaaagtgctgggattacaggcatgagctaccgtgcccagcctccttagccttttaaaaccagcatgttccatatgactgccagtgtatgtcccagagctcccctgtgtcggctggtcgctgtttatggacttatatttcagaccttggcgtttggggttctcggtaacctttgtttaggtcactgcttcacaaagtccattgcatttgttactgtagacttatctgtagatgcaaaccaaaacctggtcagatgctacctttgggaagttaaggatgtacctcttagacttttttgtcacagttatatgttatgctcgctgctgtgctcaggtgtgaaccacaaccttgtcttcctctgttgcaggtaaatttggaaggcaaagccagccctctgtcacttctacaaatggcctccccaagtggcctgtgtgtcttggttcgcctgcccaagctaatctgtggaggaaaaacactaccaagaacgttattggatattttggcagatggcaccattttgaaagttggagtgggatgctcagaagatgccagcaagcttctgcaggattatggcctcgttgttagggggtgcctggacctccgatacctagccatgcggcagaggtgtggtttgtatgaatgctgggattcctatagctgcgggacaaatattttagccagatttgtagatgcctgggactcaatagtgagacatgtgaaattgtataggagcctagaggcttctaagatgcatattgaatttgtaaggagacattccaccttctgtgaaactttggttacctagaattagcctttttagatcaaacattactgagggatctctgtaagctacaggctaaaagctggtggtcccactggctaaattatggctgcaaagggtttttggttttcttttttcccatatgatatttttgggaatttttgtttaaatcaagaatatttaatgtaaaaatctgtatttctggcttctcttgaaattaggtaatctgactacactgagtctacagttctagatggcagcatttggctgggtagcatatgtgccctttagatgagcgtgctctgttcagtttgccagagtccccaccactcccattgtaaccctggctcctcctaataagcctttgagtttgtagagcctgctttaggccaaaaatgatggtagaccagcccttatctgggaggaagagagatttcctttagaattttattcctatggaaatttgatttcagcttgtctttttggggcggggagtcgtaattacctcctcatgtttatgtatgggtcctcatttataacaacgtggactgaaacagcctcttgccctgcctgaagtgacacagtcactaaaagtttggagatttggtaaa

SEQ ID NO: 2012 - DNA, 2001 bp, Homo sapiens
gatgataaggtaaatgactagagttacctgcgtgtacattagagaggctggataatgaaaagaggatgtttatcatttctcactctactcctgggccttttttccttagcctttttttttttttttttttttttgagacagagtttcactcttgtcgttcaggctggagtgcagtggcgcaatctcggctcactgcaacctctgcctcccgggttcaagcaattctcctgcctcaggctcccatgtagctgggattacaggcacatgccaccatgcccagctaatttttataattttggtagagacggggtttcaccatgttggccaagcttgtcttgaactcctgacctcaggtgatccgcccgccttggcctcccaaagtgctgggattacaggcatgagctaccgtgcccagcctccttagccttttaaaaccagcatgttccatatgactgccagtgtatgtcccagagctcccctgtgtcggctggtcgctgtttatggacttatatttcagaccttggcgtttggggttctcggtaacctttgtttaggtcactgcttcacaaagtccattgcatttgttactgtagacttatctgtagatgcaaaccaaaacctggtcagatgctacctttgggaagttaaggatgtacctcttagacttttttgtcacagttatatgttatgctcgctgctgtgctcaggtgtgaaccacaaccttgtcttcctctgttgcaggtaaatttggaaggcaaagccagccctctgtcacttctacaaatggcctccccaagtggcctgtgtgtcttggttcgcctgcccaagctaatctgtggaggaaaaacactaccaagaacgttattggatattttggcagatggcaccattttgaaagttggagtgggatgctcagaagatgccagcaagcttctgcaggattatggcctcgttgttagggggtgcctggacctccgatacctagccatgcggcagaggtatggtttgtatgaatgctgggattcctatagctgcgggacaaatattttagccagatttgtagatgcctgggactcaatagtgagacatgtgaaattgtataggagcctagaggcttctaagatgcatattgaatttgtaaggagacattccaccttctgtgaaactttggttacctagaattagcctttttagatcaaacattactgagggatctctgtaagctacaggctaaaagctggtggtcccactggctaaattatggctgcaaagggtttttggttttcttttttcccatatgatatttttgggaatttttgtttaaatcaagaatatttaatgtaaaaatctgtatttctggcttctcttgaaattaggtaatctgactacactgagtctacagttctagatggcagcatttggctgggtagcatatgtgccctttagatgagcgtgctctgttcagtttgccagagtccccaccactcccattgtaaccctggctcctcctaataagcctttgagtttgtagagcctgctttaggccaaaaatgatggtagaccagcccttatctgggaggaagagagatttcctttagaattttattcctatggaaatttgatttcagcttgtctttttggggcggggagtcgtaattacctcctcatgtttatgtatgggtcctcatttataacaacgtggactgaaacagcctcttgccctgcctgaagtgacacagtcactaaaagtttggagatttggtaaactaaaagaaggcctgattaaaatctgtacttatcacaattttttagtataaaatgaaattttattttagtttgttagtttggcttatataaagatcttataagtgaagtataattttttaaagtaatacattaagatattgctgtgaaaattaaaactctgcgaaagtctatggagtataacagtaaaagccccccttcatcaggccctcctttctttggcaccagctccccaga

SEQ ID NO: 2013 - DNA, 27 bp, Homo sapiens
ttttcttcgatttctagtgagattcag

SEQ ID NO: 2014 - DNA, 24 bp, Homo sapiens
tgaatctattttaaggcatctcca

SEQ ID NO: 2015 - DNA, 1798 bp, Homo sapiens
gaattttattcctatggaaatttgatttcagcttgtctttttggggcggggagtcgtaattacctcctcatgtttatgtatgggtcctcatttataacaacgtggactgaaacagcctcttgccctgcctgaagtgacacagtcactaaaagtttggagatttggtaaactaaaagaaggcctgattaaaatctgtacttatcacaattttttagtataaaatgaaattttattttagtttgttagtttggcttatataaagatcttataagtgaagtataattttttaaagtaatacattaagatattgctgtgaaaattaaaactctgcgaaagtctatggagtataacagtaaaagccccccttcatcaggccctcctttctttggcaccagctccccagaatgccactgtcactgtgtgctgttagaggcagtgtggatagaggctaaaagctgactcgggagcacactgcatgggtaggagtctcagtgctgccacttgccagctgtatgacctttggcacagtactaagcctctctgttcctcagtttcctcatctgtaaagtagagttgataatgtagccacctcacagggttggtgtgagtattaaatgagttaaactacagaaaggatttataaagtgtttcacaaatagataacaaattatcattttcttcgatttctagtgagattcagtatgttatctctgtttattggccatttatatgtcttttttgattttcttgtccatgtcctttgcccgtttttgatgcatggttttctttgtttcttttagaaacaatttgctctgtaatgggcttagcctgaagtccctcgctgagactgttttgaactttccccttgacaagtcccttctacttcgttgcagcaactgggatgctgagactctcacagaggaccaggtacttcttatcagagtagttgaagaatggaaagtcattgtttctgaagtataactgtttataaaattcgaattctcaaatatagtataagtattggatggagatgccttaaaatagattcattctctggtgatactccagctaactggtctacaataatcacttaaataaaggataagagtcctgcttttgttttatttttgagatggagtctcactctgttgcccaagctggagtgcagtggtacggtcttggctcactgcaacctctgcctcctgggttcaagcaattctcctgcctcagcctcctgagtagctgagattacagatgtgcaccaccatgcctggctaatatttttagattttcagtagagatggggtttcaccacgttggtcaggctggtctcgaacttctgacctcaagtgatccacccacctcaacctccaggtgtgagctaccgagcctggccaagagtcctgattttttttgagcatttactatatgttgggcatttcagaaaaagggattttttttatgaatacaaatgtataatttaaaaaaaatatagtgttataagtgtgtaggagttataacttattttaagaagcagtaagtagttccctgcattacctttccccattcctaatccttcttccttcttctcctcagaggcaaccactttcatttctttctggtaattatcattatacttctaaattacatgcatgcgttattctttcttatttatttatattatcttttgacatcatactgtgggagatacggtttagtactcttgcagctcccctgtccccggacaaatacttctcttccccatcctcccaatttaggtaaatcatcatttttatca

SEQ ID NO: 2016 - DNA, 969 bp, Homo sapiens
tgactcgggagcacactgcatgggtaggagtctcagtgctgccacttgccagctgtatgacctttggcacagtactaagcctctctgttcctcagtttcctcatctgtaaagtagagttgataatgtagccacctcacagggttggtgtgagtattaaatgagttaaactacagaaaggatttataaagtgtttcacaaatagataacaaattatcattttcttcgatttctagtgagattcagtatgttatctctgtttattggccatttatatgtcttttttgattttcttgtccatgtcctttgcccgtttttgatgcatggttttctttgtttcttttagaaacaatttgctctgtaatgggcttagcctgaagtccctcgctgagactgttttgaactttccccttgacaagtcccttctacttcgttgcagcaactggratgctgagactctcacagaggaccaggtacttcttatcagagtagttgaagaatggaaagtcattgtttctgaagtataactgtttataaaattcgaattctcaaatatagtataagtattggatggagatgccttaaaatagattcattctctggtgatactccagctaactggtctacaataatcacttaaataaaggataagagtcctgcttttgttttatttttgagatggagtctcactctgttgcccaagctggagtgcagtggtacggtcttggctcactgcaacctctgcctcctgggttcaagcaattctcctgcctcagcctcctgagtagctgagattacagatgtgcaccaccatgcctggctaatatttttagattttcagtagagatggggtttcaccacgttggtcaggctggtctcgaacttctgacctcaagtgatccacccacctcaacctccaggtgtgagctaccgagcctggccaagagtcctgattttttttgagcatttac

SEQ ID NO: 2017 - DNA, 22 bp, Homo sapiens
cccaggttgtcgtacattttga

SEQ ID NO: 2018 - DNA, 20 bp, Homo sapiens
aagattaaccccgggagagc

SEQ ID NO: 2019 - DNA, 1690 bp, Homo sapiens
ctggcccacagtacttttctttatgaccagcttgcctatcaccagttgcttaggagaatgacttaccactattaaataagtaaattccaggaatgggccctgtgactttgatttgaggcccatgtttgaaacctatttgttttttttgttttcaatatcatattaatagatatggcagttcatttctgattgacagtcacacaggcctcttaatgaatcatgatttcagccattccagaggatgactgcctccaaagtgaatttcatgtactagttatcaggcctttgttaactacccttcccccaaacttgagagaaatctgtccagcaatttggtagtagatagaaacttcactgatttatataggtgaggattttccagcatttagagtaagtcattattttagctattttagttaaaaacatagggaacatgagagttaatcatactattcaatttacttttgtgtagtttgaaaatttttataataagaagttttaaggaagtgtatggtgcccaggttgtcgtacattttgaattaggatcctaagagttatctatttctttgtgattgactttgaagtttttctctctggtttgccttccagattccactgatctctgacttttctcttcaggtaatttatgctgccagggatgcccagatttcagtggctctctttcttcatcttcttggataccctttctctaggaattcacctggagaaaaaaacgatgaccacagtagctggagaaaagtcttggaaaaatgccagggtgtggtcgacatcccatttcgaagcaaaggaatgagcagattgggagaagaggttaatggggaagcaacagaatctcagcagaagccaagaaataagaagtctaagatggatgggatggtgccaggcaaccaccaagggagagaccccagaaaacataaaagaaagcctctgggggtgggctattctgccaggtaactgaatcactccctgtctagtaaagagtcagtggcccagccttagcaaagggtttgatgcttccctggggtctggggagaaggcttgtagtaggggagcagcagctctcccggggttaatcttgctttttctttccatcagagacatttggtctctcctttgctttatttgtgtatttttctccttttcccttattttacctttttatttattgacagttggggtggaaatgaggaaagcttagcttagttctgtcattgaccctgatgtgaccttaggccttaacttctccaactgtaaatggggatataattatcattccttccttgtttcaggctagctgtggaaaataaataacatgtagtgcctcatacttttcaggagaaatgcatcatctgatttcttgttcatatgttatttgattatttagaatgacatccagctccaagaaaatgttactctctagccaatgaaaaatgtcctgtataacttattcctctattgtaggaagatgactaataagtactttggagcataaatttggtccctgtagcaaagtgcctttaggaattaattggatgattaaattgaaggaagtgttactgcatgtgagttagaagtaaatccacatggccctcattactttggcttgaactttaaaatttttaatgtactttgtttaatccagtgatttggcagttttcttgttgcttgg

SEQ ID NO: 2020 - DNA, 22 bp, Homo sapiens
agacatttggtctctcctttgc

SEQ ID NO: 2021 - DNA, 21 bp, Homo sapiens
tcagatgatgcatttctcctg

SEQ ID NO: 2022 - DNA, 258 bp, Homo sapiens
agacatttggtctctcctttgctttatttgtgtatttttctccttttcccttattttacctttttatttattgacagttggggtggaaatgaggaaagcttagcttagttctgtcattgaccctgatgtgaccttaggccttaacttctccaactgtaaatggggatataattatcattccttccttgtttcaggctagctgtggaaaataaataacatgtagtgcctcatacttttcaggagaaatgcatcatctga

SEQ ID NO: 2023 - DNA, 22 bp, Homo sapiens
gaaggcagagagaccgtgagat

SEQ ID NO: 2024 - DNA, 22 bp, Homo sapiens
agaaactgagaaacggctcagg

SEQ ID NO: 2025 - DNA, 1680 bp, Homo sapiens
tttaatccagtgatttggcagttttcttgttgcttggttcttttttgcattcacagcagagctgtgtgtaaaccacttgacacactccctaatgtcctagtccataagtgtaaaaactagaggcataaactcattcatttttagttctgtttcctagcccagtgcaggtgaggattaaacatggtttctcactctgttttttccatagtggtgtgtttgaccttagtgttgagaatagttttgagtcactcagaagagagcatgggaaggcaacagacattttgacccacagttagcttccggtttgagatttctctttcctttccctgcagaaaatcacctctttatgataactgctttctccatgctcctgatggacagcccctctgcacttgtgatagaagaaaagctcagtggtacctggacaaaggcattggtggtatgagattcagctgtccttgtttatctctaattaggtgcattggatgctggcaggagtggggagtgagataaggaagagggagggatagaagaaggcagagagaccgtgagatgcatgggactgggtaggcacaacccagaaatcatgttctctgccaggccatagcagagaacagtgaaggtagtgctgcttcttgggtgtggtggtgggggcagggggagcagtcaaacactgatgtctcttctcttaagagctggtgagtgaagagccctttgtggtgaagctacggtttgaacctgcaggaaggcccgaatctcctggagactattacttgatggttaaagagaacctgtgtgtagtgtgtggcaagagagactcctacattcggtgagtgcagcattgggccaccctggttgtctgtggcagatggaaattgcttttgtagccatatgcagagcctttgggggctgtggctgagtctgtccactttggctgagaggcttgttcctagtatccagcttccccaagagctttggtattctgccgcccttgctatagtggcccttacccctcctgagccgtttctcagtttctggagtgcaacaccatactcagtaatggtctgtcatggggacagtggttcccttttgctcatgaaagactgaagaccagttccttcagaagctgtgtccctctcatcctctcttgactggctgaccagctttttgagccatggttttattcatggagtatccagatgtcctgaagcctgctctgtgttgtaatactgtttcacatcagggcccctgcactgtgagggtgaggctgccgactacgtctgagtgcccagacacttgggctttctccctggcttctgtggagtcactcactttcctcctttctcccctgcaaagtgagacaaagtcattgctgccaagagtttttcctgagagcttagttctccttagaaaataatgatgaacctggtgaaccagggaaatagattaaggtattcctcagatgaaggaaattggctttttcaggttcctaggccttcttgagagagttgttttccagttgtcaaaggccattagagtatcttttcagttctctgagactttcccttctgggagcacagccttctcagaggttgttattaacctgtcactatgctggcccaccactgaagcccacagcaggtggtctgtacttacttgcaggagagaggaagctaagac

SEQ ID NO: 2026 - DNA, 684 bp, Homo sapiens
agaagaaaagctcagtggtacctggacaaaggcattggtggtatgagattcagctgtccttgtttatctctaattaggtgcattggatgctggcaggagtggggagtgagataaggaagagggagggatagaagaaggcagagagaccgtgagatgcatgggactgggtaggcacaacccagaaatcatgttctctgccaggccatagcagagaacagtgaaggtagtgctgcttcttgggtgtggtggtgggggcagggggagcagtcaaacactgatgtctcttctcttaagagctggtgagtgaagagccctttgtggtgaagctrcggtttgaacctgcaggaaggcccgaatctcctggagactattacttgatggttaaagagaacctgtgtgtagtgtgtggcaagagagactcctacattcggtgagtgcagcattgggccaccctggttgtctgtggcagatggaaattgcttttgtagccatatgcagagcctttgggggctgtggctgagtctgtccactttggctgagaggcttgttcctagtatccagcttccccaagagctttggtattctgccgcccttgctatagtggcccttacccctcctgagccgtttctcagtttctggagtgcaacaccatactcagtaatggtctgtcatggggacagtggt

SEQ ID NO: 2027 - DNA, 22 bp, Homo sapiens
gcctttctgtgatctgtgttgg

SEQ ID NO: 2028 - DNA, 22 bp, Homo sapiens
ctaggtgaagcatgaggctagg

SEQ ID NO: 2029 - DNA, 1802 bp, Homo sapiens
tcccttttgctcatgaaagactgaagaccagttccttcagaagctgtgtccctctcatcctctcttgactggctgaccagctttttgagccatggttttattcatggagtatccagatgtcctgaagcctgctctgtgttgtaatactgtttcacatcagggcccctgcactgtgagggtgaggctgccgactacgtctgagtgcccagacacttgggctttctccctggcttctgtggagtcactcactttcctcctttctcccctgcaaagtgagacaaagtcattgctgccaagagtttttcctgagagcttagttctccttagaaaataatgatgaacctggtgaaccagggaaatagattaaggtattcctcagatgaaggaaattggctttttcaggttcctaggccttcttgagagagttgttttccagttgtcaaaggccattagagtatcttttcagttctctgagactttcccttctgggagcacagccttctcagaggttgttattaacctgtcactatgctggcccaccactgaagcccacagcaggtggtctgtacttacttgcaggagagaggaagctaagacacagatgggctgagagtggaataggtgatactgcctttctgtgatctgtgttgggcggtggtgcccaaggcttctcagtcatggttaggccccagttagaaccccagtagcctgtctgctgtcttcccatgtgctctgtcatacacttatgagcgctgctttccggctgggcttgttccaggaagaacgtgattccacatgagtaccggaagcacttccccatcgagatgaaggaccacaactcccacgatgtgctgctgctctgcacctcctgccatgccatttccaactactatgacaaccatctgaagcagcagctggccaaggagttccaggcccccatcggctctgaggagggcttgcgcctgctggaagatcctgagcgccggcaggtgcgttctggggccagggccctgctcaacgcggagagcctgcctactcagcgaaaggaggagctgctgcaagcactcagagagttttataacacagacgtggtcacagaggagatgcttcaagaggctgccagcctggagaccaggtacaaagcacaggaattgtggaatgtaccagggacattaaccctcattacttagtgagaatgcttgccagggagggggcattggctgcttaggcacagtgcctagcctcatgcttcacctagtaggtgtctagtagtttaagataccttggaagtggaatagaacaatctacttgaggagttcctttccataggaaacttgcttttgtgaggtgcctatctttgacctttttaaagatcatacacttaatttcggtcatttttgtgattagcgtgcgagtgcagttgtggtggagctgcatcttacacattctatgcagacgtaaatcctcatgccagcacatgagatgaaataatagtccaataacaccctcgaagttctgaagttccccatgagatacagtacattcacccctcagtatccatgggggattggttccaggacctcccttggatactaaaatccaccaatgcttaagtgcctgatatacaatggcatagtatttgcatatatcctgcacacatcctcctgtatactttaaataacctgtaaattacttataatacctaatacaatgcaaatgctatgtaagtagcttttatattttattgtttatgaagtaatgagaaaaaagtttgtacatgtttggtacagatagtacagata

SEQ ID NO: 2030 - DNA, 798 bp, Homo sapiens
ggccccagttagaaccccagtagcctgtctgctgtcttcccatgtgctctgtcatacacttatgagcgctgctttccggctgggcttgttccaggaagaacgtgattccacatgagtaccggaagcacttccccatcgagatgaaggaccacaactcccacgatgtgctgctgctctgcacctcctgccatgccatttccaactactatgacaaccatctgaagcagcagctggccaaggagttccaggcccccatcggctctgaggagggcttgcgcctgctggaagatcctgagcgccggcaggtgcgttctggggccagggccctgctcaacgcggagagcctgcctactcakcgaaaggaggagctgctgcaagcactcagagagttttataacacagacgtggtcacagaggagatgcttcaagaggctgccagcctggagaccaggtacaaagcacaggaattgtggaatgtaccagggacattaaccctcattacttagtgagaatgcttgccagggagggggcattggctgcttaggcacagtgcctagcctcatgcttcacctagtaggtgtctagtagtttaagataccttggaagtggaatagaacaatctacttgaggagttcctttccataggaaacttgcttttgtgaggtgcctatctttgacctttttaaagatcatacacttaatttcggtcatttttgtgattagcgtgcgagtgcagttgtggtggagctgcatcttacacattctatgcagacgtaaatcctcatgccagcacatgag

SEQ ID NO: 2031 - DNA, 22 bp, Homo sapiens
ggattgcgagtcgtatgttcag

SEQ ID NO: 2032 - DNA, 22 bp, Homo sapiens
agcagaagcatcctgggattag

SEQ ID NO: 2033 - DNA, 660 bp, Homo sapiens
tagagctcagaaccctcaaataccttctgttgggattgcgagtcgtatgttcagactataaaaagggcagagataagaaagaggatgtttcgaaaacaccaaagtaactaaccctttaggagtccttcaacctccccagttacccttggcgcgcagcatttgaagctgtctgtgaggccatcctgcgcttgtttccctcagacactttgtttttcatgttttggcagaatctccaatgaaaactatgttcctcacgggctgaaggtggtgcagtgtcacagccagggtggcctgcgctccctcatgcagctggagagccgctggcgtcagcacttcctggactccatgcagcccaagcacctgccccagcagtggtcagtggaccacaaccatcagaagctgctccggaaattcggggaagatcttcccatccagctgtcttgatagctgctttcctcccagttaggacaagtgggaagctggagccaaggttgaagagtcacctcttcccattttagtacatcattaattgtcaaagcctgtgtgacacaactcagaatactaacctagactaatcccaggatgcttctgctggagcaaagatattgtttgaaggagagtttatggttttggattttaaacgggcagggtcttttttcc

SEQ ID NO: 2034 - DNA, 22 bp, Homo sapiens
gccaaggttgaagagtcacctc

SEQ ID NO: 2035 - DNA, 23 bp, Homo sapiens
aaaggaaagccttttcaagtacg

SEQ ID NO: 2036 - DNA, 660 bp, Homo sapiens
tgatagctgctttcctcccagttaggacaagtgggaagctggagccaaggttgaagagtcacctcttcccattttagtacatcattaattgtcaaagcctgtgtgacacaactcagaatactaacctagactaatcccaggatgcttctgctggagcaaagatattgtttgaaggagagtttatggttttggattttaaacgggcagggtcttttttcctctcatttttgtggacaagagaggccttcgcctttatttttactctccctcttctgctgtccctgtgcagaggaaaaatgaagaattctcccagaagtgacttgtcaagacttaaaaaaaatgtttttaatgcatttcttccttgtctagtgcctcggtttatctctaacaggggctgtccagtatatcggtcctgttaggaggggagaaaaagttcttccaaaggctggagaagtgaacaaggagtcaaatttattttcccaattcaacttcataattatcatttctttggcttcatgctctcccgtaactcatgtggttgggatccatcccatctgggtcacttcagtctacttcacgtacttgaaaaggctttcctttacacttccaggaccaaacagcaacttcctgccacacacttccaccctatcactgggagaa

SEQ ID NO: 2037 - DNA, 2001 bp, Homo sapiens
cttaaaagaggggtgaactggtcactgggtaatcctggaagaaatggaagaccagcattcttcatccattatcagctggatggtagtgcccctctcgtgggagctgaacattatgaagtggccttcctgtcagtagagctcagaaccctcaaataccttctgttgggattgcgagtcgtatgttcagactataaaaagggcagagataagaaagaggatgtttcgaaaacaccaaagtaactaaccctttaggagtccttcaacctccccagttacccttggcgcgcagcatttgaagctgtctgtgaggccatcctgcgcttgtttccctcagacactttgtttttcatgttttggcagaatctccaatgaaaactatgttcctcacgggctgaaggtggtgcagtgtcacagccagggtggcctgcgctccctcatgcagctggagagccgctggcgtcagcacttcctggactccatgcagcccaagcacctgccccagcagtggtcagtggaccacaaccatcagaagctgctccggaaattcggggaagatcttcccatccagctgtcttgatagctgctttcctcccagttaggacaagtgggaagctggagccaaggttgaagagtcacctcttcccattttagtacatcattaattgtcaaagcctgtgtgacacaactcagaatactaacctagactaatcccaggatgcttctgctggagcaaagatattgtttgaaggagagtttatggttttggattttaaacgggcagggtcttttttcctctcatttttgtggacaagagaggccttcgcctttatttttactctccctcttctgctgtccctgtgcagaggaaaaatgaagaattctcccagaagtgacttgtcaagacttaaaaaaaatgtttttaatgcatttcttccttgtctagtgcctcggtttatctctaacaggggctgtccagtatatcggtcctgttaggaggggaaaaaaagttcttccaaaggctggagaagtgaacaaggagtcaaatttattttcccaattcaacttcataattatcatttctttggcttcatgctctcccgtaactcatgtggttgggatccatcccatctgggtcacttcagtctacttcacgtacttgaaaaggctttcctttacacttccaggaccaaacagcaacttcctgccacacacttccaccctatcactgggagaaatccttttctggacatgagcctttgacctgggtggggcagaaagaaccacaaactccatctcccaatagaactttgaaattcactcagcttttcctttcatgctgtttgttgcctgcttgttgcactcctcctgccccagaactgcaagatttttagcttcacccctttctgagagtaatgttatcttttatcagaatcagtatcagttcccctgtattctgtgcttcatcgaatttgcaagactgacctcttttaagcatttaattcactcccagagtcatctggtcaggttgcaatatgaggacttctctgtctcctctgaagcctgggacactgagcttacttaatacattagatgttcaaaagaggagcgttgtttcatctttcaaaatgttaggccattactttgagtataaaatcgacttattaatgattagtaatttttctaaagtattgggaaaactttcttattttataagatcttaacaagcttaaaaaagaattttatgaccagaatccaacaagagctctattttggaattgtgcccaagttggtgatgtttactctaaaattaataataaaactacttgtaagcacaaggctcactggatgtaaatgtaaaacttcgcgactttataaaactggcattcctaggggaggggctatttatcctacaggtccctgcctcctggcagtgccatggtatgtgtgcatggatataccagacacagtcaccatcggccatcagtagcagcccatgaaccc

SEQ ID NO: 2038 - DNA, 22 bp, Homo sapiens
tctcccgtaactcatgtggttg

SEQ ID NO: 2039 - DNA, 22 bp, Homo sapiens
caggcttcagaggagacagaga

SEQ ID NO: 2040 - DNA, 609 bp, Homo sapiens
ggagaagtgaacaaggagtcaaatttattttcccaattcaacttcataattatcatttctttggcttcatgctctcccgtaactcatgtggttgggatccatcccatctgggtcacttcagtctacttcacgtacttgaaaaggctttcctttacacttccaggaccaaacagcaacttcctgccacacacttccaccctatcactgggagaaatccttttctggacatgagcctttgacctgggtggggcagaaagaaccacaaactccatctcccaatagaactttgaaattcactcagcttttcctttcatgctgtttgttgcctgcttgttgcactcctcctgccccagaactgcaagatttttagcttcacccctttctgagagtaatgttatcttttatcagaatcagtatcagttcccctgtattctgtgcttcatcgaatttgcaagactgacctcttttaagcatttaattcactcccagagtcatctggtcaggttgcaatatgaggacttctctgtctcctctgaagcctgggacactgagcttacttaatacattagatgttcaaaagaggagcgttgtttcatctttcaaaatgtt

SEQ ID NO: 2041 - DNA, 22 bp, Homo sapiens
tcgaatttgcaagactgacctc

SEQ ID NO: 2042 - DNA, 22 bp, Homo sapiens
ccgatggtgactgtgtctggta

SEQ ID NO: 2043 - DNA, 613 bp, Homo sapiens
aatgttatcttttatcagaatcagtatcagttcccctgtattctgtgcttcatcgaatttgcaagactgacctcttttaagcatttaattcactcccagagtcatctggtcaggttgcaatatgaggacttctctgtctcctctgaagcctgggacactgagcttacttaatacattagatgttcaaaagaggagcgttgtttcatctttcaaaatgttaggccattactttgagtataaaatcgacttattaatgattagtaatttttctaaagtattgggaaaactttcttattttataagatcttaacaagcttaaaaaagaattttatgaccagaatccaacaagagctctattttggaattgtgcccaagttggtgatgtttactctaaaattaataataaaactacttgtaagcacaaggctcactggatgtaaatgtaaaacttcgcgactttataaaactggcattcctaggggaggggctatttatcctacaggtccctgcctcctggcagtgccatggtatgtgtgcatggatataccagacacagtcaccatcggccatcagtagcagcccatgaacccacgtgcacatcctgcatcttgct

SEQ ID NO: 2044 - DNA, 21 bp, Homo sapiens
aagcatgatgtttgggttcag

SEQ ID NO: 2045 - DNA, 19 bp, Homo sapiens
gcagcctgagaagggagat

SEQ ID NO: 2046 - DNA, 421 bp, Homo sapiens
aagcatgatgtttgggttcagaaaattcctgagttgaaatggctacttagaatctgcttctgctgctgctgcttttttttttgttttttttttttttttgagacagagttttgctcatgtcatccaggctggagtgcagtgatgcaatcttggctccctgcaaactctgcctcctggatttaagcgagtctcctgcttcagcctcccaagtagctggggttacaggcgtgcaccaccgcacctggctaattcttgtatttttagtagagacgtggtttcaccatgttggtcaggctggtctcgaactcctgaccttaggtgatccgcccgcctcagcctcccaaagtgctgggattacaggcgtgagccatcgcacccggcccctacttctgcttcctaaagatctcccttctcaggctgc

SEQ ID NO: 2047 - DNA, 23 bp, Homo sapiens
tcagaaagagagaagggaaatct

SEQ ID NO: 2048 - DNA, 23 bp, Homo sapiens
aaagtacccaattcaattctcca

SEQ ID NO: 2049 - DNA, 302 bp, Homo sapiens
tcagaaagagagaagggaaatctgtatgtttaaccacattgccagtgctctaggatttaataggagataagtgtaaaagggaaatgaggcaagtgtgccaggtgttgtagatgggaggatattgagtggggaaagactgtttctcattttaaggataaagaaattaagattttatatatatatacacacacacacgtatatatacatatatacgtatatatgtgtgtatatatacatatgtatatatacacacatatatgtatgtatatatgtatgtaatggagaattgaattgggtacttt

SEQ ID NO: 2050 - DNA, 20 bp, Homo sapiens
caccaacccaacaaacctct

SEQ ID NO: 2051 - DNA, 20 bp, Homo sapiens
aatgcacaaccttccaatcc

SEQ ID NO: 2052 - DNA, 260 bp, Homo sapiens
caccaacccaacaaacctctaagtggtgattttttggcttatttgtccacaaggactgtgattttttgttttgtttttagcaatactttattaaagtgcagtataagtaacatatgataaagtgcacacatctaagaatacaactcaatgaattttgacaaatgcatatatccatataaccaccaggggctggtgtttttaatattttgtgaagcacctattctaatgatgtacgttttgggattggaaggttgtgcatt

SEQ ID NO: 2053 - DNA, 20 bp, Homo sapiens
cagtctttctgccctccttg

SEQ ID NO: 2054 - DNA, 20 bp, Homo sapiens
ggttcgcgaccaaataagaa

SEQ ID NO: 2055 - DNA, 125 bp, Homo sapiens
cagtctttctgccctccttgaaggcaaccagtgttactattaatttgcatccctcagagagattgtatgtgtgtgtggttttgttttgtgttttaattcccaggtttcttatttggtcgcgaacc

SEQ ID NO: 2056 - DNA, 20 bp, Homo sapiens
gccatgggttgagaatcact

SEQ ID NO: 2057 - DNA, 20 bp, Homo sapiens
tgcaaattgggaactctgaa

SEQ ID NO: 2058 - DNA, 236 bp, Homo sapiens
gccatgggttgagaatcactgaagctgtgtgtttatcatagtgggccccctctctctctatatatatatatatatatatttgaaattttccattaaaaatgttctttaaaaactcagtcttttgtttgttttaaagtaatgcttagttgcaacctaaaagcaaaccatagattaatctctagacagaaccccctgccccaccatccaagtcagacattcagagttcccaatttgca

SEQ ID NO: 2059 - DNA, 22 bp, Homo sapiens
tgctgtaatccagaagtttcca

SEQ ID NO: 2060 - DNA, 20 bp, Homo sapiens
tgatgggcaatcaactagga

SEQ ID NO: 2061 - DNA, 169 bp, Homo sapiens
tgctgtaatccagaagtttccagattcttgaacaaatggactattttcagttgttgggatgtgtgtgtgtgtgtgtgtgtgtgtgtgtgtatgtctgtgtgtgtgtaagatgtagagggggggatcaaatgataataaagaaaattgtatcctagttgattgcccatca

SEQ ID NO: 2062 - DNA, 20 bp, Homo sapiens
ctgaggcagggaatggttta

SEQ ID NO: 2063 - DNA, 20 bp, Homo sapiens
accaattccaggaacactgc

SEQ ID NO: 2064 - DNA, 268 bp, Homo sapiens
ctgaggcagggaatggtttaaaacattaaaacaagtaaatagaattctaaaatgctagcacttgaaaggaccttccaagtacttttttctttcttcttttcttttttcttttctcttcttttctttttcttccttcctttttttcccaaagccctccccataaacatgaggaagaggcccagataagtgacttttccagggtcaccatgctagctgacagcatatcagctactgaagtggaaattaaagcagtgttcctggaattggt

SEQ ID NO: 2065 - DNA, 20 bp, Homo sapiens
ttctccggtggacacaaata

SEQ ID NO: 2066 - DNA, 21 bp, Homo sapiens
cagccatcttctgtcttctgc

SEQ ID NO: 2067 - DNA, 147 bp, Homo sapiens
ttctccggtggacacaaataggaggaaagaaattagtaattccaggaaaagcctgaagtcaaattccaattgaaaacagagcctgtgcacacatgcacccgcccacccacccatacacaagtactggcagaagacagaagatggctg

SEQ ID NO: 2068 - DNA, 20 bp, Homo sapiens
ccggtggacacaaataggag

SEQ ID NO: 2069 - DNA, 21 bp, Homo sapiens
ccagtgacagtaagccagagg

SEQ ID NO: 2070 - DNA, 277 bp, Homo sapiens
ccggtggacacaaataggaggaaagaaattagtaattccaggaaaagcctgaagtcaaattccaattgaaaacagagcctgtgcacacatgcacccgcccacccacccatacacaagtactggcagaagacagaagatggctgccggcaaagtctattgtctgtctgtcctgctgggctccgggctgagattcagggtccaggcagaggctgtgagaggcagcatagcgccatccctctgccaaaaaacttgcagccctctggcttactgtcactgg

SEQ ID NO: 2071 - DNA, 20 bp, Homo sapiens
tgagtgggctatttggcatt

SEQ ID NO: 2072 - DNA, 19 bp, Homo sapiens
gtggccaaggtcctcagat

SEQ ID NO: 2073 - DNA, 264 bp, Homo sapiens
tgagtgggctatttggcattttcatgggacagaatggggagtagcagcagctgccaccctcaatattcattcattcatttactctgcctagatatttagcgagtgctgccaagatgcccaacactgtgctagaaactcatgatacataaaaggaggctgccagtctctgcttagaggagctcccattcaagggaaagacaggcatgtggtaggcactaacctggcatcttgggccatgtagtctgatctgaggaccttggccac

SEQ ID NO: 2074 - DNA, 20 bp, Homo sapiens
ttctcctccttccctcttcc

SEQ ID NO: 2075 - DNA, 20 bp, Homo sapiens
cactcaatgcaccaatcgtc

SEQ ID NO: 2076 - DNA, 384 bp, Homo sapiens
ttctcctccttccctcttcctctcccttccttccatcaacaaataactatgcgatcgcattccaagggcttcagacaaacaaacaaacaaaaaaacaaatactacacactaacaagcatgtactatttgccactactataggcaccggggaaacagtggtaaggaaaatatacaagaaccccagtcctcttggaatttttactccagtggcagaaactaataagtaagaaaccagggttatcagacaagtaggaggaggaggattgacaataagaaaactgccaagttcctttcaaagagctaagtcctttcctccatctataatggtttatagaaactaccttataaatatcttttccttagagacgattggtgcattgagtg

SEQ ID NO: 2077 - DNA, 18 bp, Homo sapiens
cctgctctgtgcctctcc

SEQ ID NO: 2078 - DNA, 20 bp, Homo sapiens
tgccaagaacagacctgatg

SEQ ID NO: 2079 - DNA, 147 bp, Homo sapiens
cctgctctgtgcctctcccctgccttgcctccagcctgctcagcagaggctctggaagatgcagccacccacccacgggcaggacagtctatgactgctggacattagccatggccaaagaggctggcatcaggtctgttcttggca

SEQ ID NO: 2080 - DNA, 20 bp, Homo sapiens
ctgcacccacttgggattac

SEQ ID NO: 2081 - DNA, 20 bp, Homo sapiens
gcacagaagtgaagcgtagc

SEQ ID NO: 2082 - DNA, 266 bp, Homo sapiens
ctgcacccacttgggattacaatctgaaacgaagaccacagactgtagccaaggtggcaattcctggtctttagctctgccagagtgcctatggcttcaggcacattactccacctctgtctatgtggaattcctgtcagtcaaatgagcatggcaattacttgctgtcttacccccaccccacccccatcatcccccagggaagtgcccaactaaggaacaactgtggtgaagtcatctagagaggctacgcttcacttctgtgc

SEQ ID NO: 2083 - DNA, 20 bp, Homo sapiens
cgcttcacttctgtgcagtc

SEQ ID NO: 2084 - DNA, 20 bp, Homo sapiens
agcctggtctgtgcatctct

SEQ ID NO: 2085 - DNA, 365 bp, Homo sapiens
cgcttcacttctgtgcagtctttctggtggtgggggccaagcaaaccttctctcagggacagaactaccaggagtgaccatttggggcagatatatagcatcctcaccactgagccctgggcagtaagtggtgagatgtgagaaaccctgccacattccagcccatcccacccctccctccttccccccatggagccttccttttggagtcaccagaagccccaactgtctggtttcagtcagcatggtccagcttcatccccgtgccgaggggtgagtttggagccttttaccaggaggtgataggtgatgtgatgtcttcgaatcccacatccaaaggcaactagagatgcacagaccaggct

SEQ ID NO: 2086 - DNA, 20 bp, Homo sapiens
catcccgctcattgtgagta

SEQ ID NO: 2087 - DNA, 20 bp, Homo sapiens
ggcaggaatgctccaacata

SEQ ID NO: 2088 - DNA, 159 bp, Homo sapiens
catcccgctcattgtgagtacgccccgagcgtcggccggccggctagggagccgcggcgcgcgtccagaccctgcgcggcggccgagggcgcggggcccggccagggctgagtgcccgctgcgccgggccggctttgtatatgttggagcattcctgcc

SEQ ID NO: 2089 - DNA, 20 bp, Homo sapiens
cacccacaattccctttgtc

SEQ ID NO: 2090 - DNA, 20 bp, Homo sapiens
gacaggaaatcaggcccttt

SEQ ID NO: 2091 - DNA, 416 bp, Homo sapiens
cacccacaattccctttgtcaaaatgttcagatttttttcttttctttcttttctttttttattttctcttttctttttctttctttttttttttggacacagggtctcactctgtcacccaggctggagtgcagtggcacagtcatgattcactgcaaccttcacctcctgggctcaagcgattcccctgcctcagcatcctgaatagctaggactacaagtgtgtgccaccacacctggttgatttttatatatttttgtagagacagggtctttccatgttgtccaggttggtctcaaacttctggactcaaggggatcctcccaccttggcctcccaaagtgctgggattacaggcgtgagccactgcgcccagccaaaaatgttcagatataaagggcctgatttcctgtc

SEQ ID NO: 2092 - DNA, 20 bp, Homo sapiens
agacgtggaaaggagcagag

SEQ ID NO: 2093 - DNA, 20 bp, Homo sapiens
ccaggtctccaacgaatgtc

SEQ ID NO: 2094 - DNA, 261 bp, Homo sapiens
agacgtggaaaggagcagaggagccgagctttcagacatgagttaactgctgattatacttgggcagtaaattcagttcagttaatcagtgtgcttgcctggtacagtcaccgactgtgtgtagcccactctgaaaacggtgtcaagtggtttagtccctcttctctgaaatcttgtggtctttgacccgtacctgtctagcctccataatcactgtatactctgttatgttgatggtgatgacattcgttggagacctgg

SEQ ID NO: 2095 - DNA, 20 bp, Homo sapiens
aggagctgctgacacactga

SEQ ID NO: 2096 - DNA, 19 bp, Homo sapiens
atgctgccttcagcattcg

SEQ ID NO: 2097 - DNA, 126 bp, Homo sapiens
aggagctgctgacacactgagaagtgacagctgatagcaaaggcctagccaggaagggccgtgtgaggtaggaggggcccctcctgcctccacacacacacagggtccgaatgctgaaggcagcat

SEQ ID NO: 2098 - DNA, 22 bp, Homo sapiens
tgtcttggaacacttcatttcc

SEQ ID NO: 2099 - DNA, 25 bp, Homo sapiens
cccatatatcatacatcacacgttc

SEQ ID NO: 2100 - DNA, 150 bp, Homo sapiens
tgtcttggaacacttcatttccttaaaatgtgggatcaatgtgtgttgtgtgtggtatgtgtggtgtgtggtgtctgtggtatgtgtatgtgtagtgtgtatgttgtgttgtatgggtatgtatagaacgtgtgatgtatgatatatggg

SEQ ID NO: 2101 - DNA, 20 bp, Homo sapiens
gctcagggagaaagaacacg

SEQ ID NO: 2102 - DNA, 20 bp, Homo sapiens
ccaccaagactgcactcaca

SEQ ID NO: 2103 - DNA, 801 bp, Homo sapiens
  misc_feature 401: n = A,T,C or G
cttctgatatttcaaggtctttcatgtcaagggaagctggccttgggctgccacagcccactggggcaacccgagttgccttccaaagttgctggatcagcggtccgttccagggggcttcacttctgacgcctcacacatctgtgacctgattatttccttggaagtcatcttttcctctccctgtggaagttctcactggatagggagatgcggggcatgtggcaggcttggggcattatcccagggatgaggggaagtgcagcctggggctcagggagaaagaacacgtgatcgcctagtgatgtcttgctggggatctggtggtttgaaggggcgaagcagttaggactgagcacagcccccacaaataccgcaccaacctagaggccggatgaagngagaaccaaaggtcagggcaaacacaccgcagggaccagggaaggcaagggagcagcaggccaaagcacttctccaagtggaaagcagaggctacccacggtgatgtgtgagtgcagtcttggtggtgccttgcgggggcatgaacatggcaagggccttctcccaaaacaacaacgggacatggctcatcgctggatgcaccccggaattgccaactccagttgttttttgtatagcagagaacacagcgtcacccaactacctcttccagacaatgcagcatccctgaaccacaccggggccggggctctggaactgggactcacagcggggtgaggatgggctagctcaagacctatggaacttgggagatcagaaggccagcgctggggcaaagct

SEQ ID NO: 2104 - DNA, 20 bp, Homo sapiens
tgctggtgctcacattcatt

SEQ ID NO: 2105 - DNA, 20 bp, Homo sapiens
ccttccttggacaacctcct

SEQ ID NO: 2106 - DNA, 390 bp, Homo sapiens
tgctggtgctcacattcattcacatcccctctcttaagtgctaggagggaccaggtgctgtggctcgtgcctgtaatcccggcattttgggaggctgaggaggggagatcatctgaggtcaggagttcaagaccagcctggctaacatggtgaaaccccatctctactaaaaatacaaaaaaattaaccgggcctggtggcatgcacttgtaatcccagctactcaggaaggggaggcacaagaattgcttgaacctggaaggtggagtttgcagtgagccaagatcgtgccactgcactccagcctgggtgacagagcaagactctgtcataaataaataaataaataaatacataaataaaaagtgctaggaggttgtccaaggaagg

SEQ ID NO: 2107 - DNA, 2001 bp, Homo sapiens
catggtgaaaccccatctctactaaaaatacaaaaaaattaaccgggcctggtggcatgcacttgtaatcccagctactcaggaaggggaggcacaagaattgcttgaacctggaaggtggagtttgcagtgagccaagatcgtgccactgcactccagcctgggtgacagagcaagactctgtcataaataaataaataaataaatacataaataaaaagtgctaggaggttgtccaaggaaggttatacagtcatgtgctgcaacaatgttttggtcaaccagggactacatatatgacagtggtcccatcagattataatggaactgaaatattcctcccctactgaccctgtagccactgtaatgttgcagcacaattactttattttaaaaaataaatttagtgtagactacatgtacagtgtttataaagtcgtgtaacatcctaggccttcccattcactcatcacgcactcactgactcacccagagcaattcccagtcctgcaagctccattcatggtatgtgccctatacaagtctaccattttttatcttctatactgtatttttactctactttttatacgtttagatacgtacacatgtgaaaatacttattgtgttaccatcgcctaccattcaggacagtaatatgctgtacaggtttatagcctaggagcaatagggtatcccatatagcctagttgtgctggaggttataccatctaggtttgtgtaagtgcactctgacatttgcacagtgatgaacttgcctaatgacgcatttctcagaatggataaggaatgcatgactgtatacaaagtgaagaatctggctacgcatcctagtttaccttgacttcaggattagatctttccagtccagctgctgctgagctattggttcctaattcaccattatccgtgagcatgggatacctcccagcatgggctctagtcctcatatcatcattaaaaacaaggtcaatattttgtgcagtgtcttctcttttagaaatcccttctaagctcttgctgtgatgaaaatgggttttggaggaggggtaggagcagtggaggcgagaagccttttactcccctggaaggtagagggattatttccagtctgttgcttttggtgtttcgtctttgtcctgttacagccagaatgacaagtaggtctcagctctaatgccaactcagaacttgtggaagtggcagcctggagcactgtggtgaggattctggagctgcctccaggctgagcgggaaagaggctatgatcgattagccatgtctgtaaagggcttggaaagggaccctaggacatgcaccttgtatttactaatcctgcattaggtgaggttgtcttcttggagtgatttttctccactttagagatctgacatgctttaagacatcagccactttgaagaagcagggatgaggcttacactgagccagaacatgtgcagaagagacattctcatctccttgggccagaatcctagctaaggagatgtgtgacattttagtaagcattcctgtcaggaaagtctcaatacccacttcacatatttggtgtaggtgagcttggctctggtctgggctcagcctactggcaagataggacatagttagagccgtaaacccaagaagagtaggaatctgcagggtctggaagaaatgggaggggttggctctttttctgtctttcctcttctttgcttaaaaacaggagctgtggatttgagaacatgtcttgcttcttggtgctaaatttctgatgatggctttgttcaggatgcagcatagcgtagtggttatgggcacagacattgcagccaaagtgtcagggttcatattctagttctgccacttactagcaagttacttaagcattccatgcctctggtttctcatctggaaaatgaggatgctagtaatccgcgttttagagggttgctctgaagattgagttaattcacatcaaga

SEQ ID NO: 2108 - DNA, 20 bp, Homo sapiens
agctctatgcaaagggagca

SEQ ID NO: 2109 - DNA, 20 bp, Homo sapiens
cctggccagttccactttta

SEQ ID NO: 2110 - DNA, 286 bp, Homo sapiens
agctctatgcaaagggagcaggaccacccacttgggatggagtaccttgcaggagtaaaataaatgaaattgatcagtatatatatatatcagtatgaaaggagctgaaaaatatgatgttagggaggaaaagaactgcattgcagaattgatgatttagtatgataccatttatgtaaattaaaataatacaaaacaattccatatatcatccttgggtgtgtctatgtgtgtgtgtgcgcatgcgacatatacatctcaaagtataaaagtggaactggccagg

SEQ ID NO: 2111 - DNA, 21 bp, Homo sapiens
gggaggaaaagaactgcattg

SEQ ID NO: 2112 - DNA, 20 bp, Homo sapiens
cctggccagttccactttta

SEQ ID NO: 2113 - DNA, 165 bp, Homo sapiens
gggaggaaaagaactgcattgcagaattgatgatttagtatgataccatttatgtaaattaaaataatacaaaacaattccatatatcatccttgggtgtgtctatgtgtgtgtgtgcgcatgcgcacatatacatctcaaagtataaaagtggaactggccagg

SEQ ID NO: 2114 - DNA, 20 bp, Homo sapiens
gggccctgtatctgctctaa

SEQ ID NO: 2115 - DNA, 20 bp, Homo sapiens
ggaagaggtgggatggagag

SEQ ID NO: 2116 - DNA, 429 bp, Homo sapiens
gggccctgtatctgctctaagtgcaggccccgtatctgctctaagtgcaggcttaagaatttgtcctatttatttatttatttatttatttatttatttgagacagagtctccctctgttgcccaggctggagtgcagtggtgctatcttggctcactacaacgtccgcctcccaggttcaagcaattctcctgcctcatccctcctgagtagctaagattacaggtacacaccaccaacctggctaatttttgtatttttggtagagatggggcttcaccatgttggccaggctggtctcaaactcctgacctcaagtgattctcccaactttgcctcccaaagttttgggattacaggtgtgagccactgcacctggccgagatgattttttatatgttctctactgctctccatcccacctcttcc

SEQ ID NO: 2117 - DNA, 19 bp, Homo sapiens
gtgggaagaagtgggcagt

SEQ ID NO: 2118 - DNA, 20 bp, Homo sapiens
ttcctaagagcacccgtttc

SEQ ID NO: 2119 - DNA, 136 bp, Homo sapiens
gtgggaagaagtgggcagtctccacaggggcctacaaggactgccctggcttccatggtggtgatagtggtggtggggcagactcctggatgctccaccaggagtcttcctggaaggaaacgggtgctcttaggaa

SEQ ID NO: 2120 - DNA, 21 bp, Homo sapiens
gtgtcaaggacacttcttcca

SEQ ID NO: 2121 - DNA, 20 bp, Homo sapiens
cggaaagtcagagccaagtc

SEQ ID NO: 2122 - DNA, 428 bp, Homo sapiens
gtgtcaaggacacttcttccaggctgggtgtggtggttcatgcttataatcccaacactttgggaggccaaggcaggagaattgcttgaggccaggagttcgagaccagcctgggcaacatagtaaaaccctgtttctacgacaaattttaaaaagttaactgggcatagtggcatgtgtctgtagtcccagctaactcgggaggctgaggcaggaggattgcttgagcctaggaggcagaggttgcagtaagccaagatcatgccgctgcactccagcctgggtagcagaatgaaaccctgtctcaaaaaataaagtaaaataaaattttatgtgggaacttttgaagtttgtccccaaagctcttatctaataagcccccctccccggcttattagataagagggagacttggctctgactttccg

SEQ ID NO: 2123 - DNA, 22 bp, Homo sapiens
ggtgagtcagctgcttaatgct

SEQ ID NO: 2124 - DNA, 20 bp, Homo sapiens
cagtcagctgtgctccttcc

SEQ ID NO: 2125 - DNA, 134 bp, Homo sapiens
ggtgagtcagctgcttaatgctgctgcccctgctgggccctgctcctcctaggagaggagcctgaggccaatgcaggcagggcagggaatgggagtgccatcccagagccccagggaaggagcacagctgactg

SEQ ID NO: 2126 - DNA, 20 bp, Homo sapiens
tcaggagggcagaggagtta

SEQ ID NO: 2127 - DNA, 20 bp, Homo sapiens
ggttcccacaccttcttgtg

SEQ ID NO: 2128 - DNA, 259 bp, Homo sapiens
tcaggagggcagaggagttacagcctctcaacagcaacgttggggcctgccaatgccagttcctgatgcccccctctttctcagggctggtgagtgcccagcgcccttcacctgcattggcaggattctgttctagctgtgtgtggccctctctctgcccctggagggccctccctccttcagcttgtagatagggagtggagtgggtaaggaggtgttgctggagaagtggcctatatcacaagaaggtgtgggaacc

SEQ ID NO: 2129 - DNA, 2001 bp, Homo sapiens
tcattttctttctttcttttactctttttgctttagtttatacatttttatgttaagaatttttgaatgggctattcttatacaccttgactcatgttttaaggtttttaaaaataacagctttaatgaggcatgattcacatactatacaattcacccattaaagtgtaccagtccatggtttttagtacttagctcacttttaatgctcatcctcaatctttaagagtatttttttctaattgcattagtattatgtatttggaaaagccaaaaaaaaaaacaaactacaaagaaaaacataacactgtcacttagagatatccagttaacatttttttaaaaacaaaaataataccatattgtagatcacatgctgaggtttcttttatcattctcagttcttctaagtctctcaattatgtgttcagcctctaggtcttctagtgacataatcgtcggtgatgataacaatagcaataataactataatactaccgacttactgagagcttgttatgtgccagcattgtgtcttacatactttatgtgctcgatctcaattaatccttgaaacagtttgttggtcggtactgtactcacccctattttacagctacaaaaactgaggctcagagaggttaagtaatttgcctcatgttaaacaggtagcaactgaaaaaactaaggtttgaacactcatctatgcaacttcaaaatctctagtcactcagctacaagttcagactagagacattcaggactggttaaagaaagcagcccctctctcaggaagagtcaggagggcagaggagttacagcctctcaacagcaacgttggggcctgccaatgccagttcctgatgcccccctctttctcagggctggtgagtgcccagcgcccttcacctgcattggcaggattctgttctagctgtgtgtggccctctctctgcccctggagggccctccctccttcagcttgtagatagggagtggaatgggtaaggaggtgttgctggagaagtggcctatatcacaagaaggtgtgggaacccctctggcgggagtcatctcatagctcttccaacctgttggtagggaatgatagaacaattccaaatctctgcacttcacaatcagcctcccgttccctgtcgccacttcccacgtcctccaccatgttccatcctcacagacactttgggggcaacttcccctgcagttgcccaagccaagtagtcagcaggagcttcatggctgttagctggagcggaaggctggctgcctggttgccacagcaacagctgttgtaagtaagtggtccttgtgacagaagacaatttaataagccagatctgggggcctagtgggaaggttgctagtggctttactgggtatcttctgtggtgctggagctgtaggcaggcaggtgtgactgaggagagttggagtcgggggaggccaggcatctgcctttacccaagggctggaggcttttgtcctgcagaggtaggcccagccaagagggagctgcctcctgtgtcttcagagatcccgacactcaactctggacatcacccaaggccgaggccttgcacttctgctcccagctagaatgaactagcttgtatcagagcagttcttctgctgagaacaactggacaatttggatgaagcataagaaacatctgtgtgcagttgagactgaggcagacaggacaggtgtccatatctagggcccgatttcagcacgtgcagtagccctgggaaaatggcatgctgtttctgcatctctgtgctcctagtaaaacagcaaaactcctggaaagagttgcctatccttgctgtgctgtttctctcctttcattctttcttgaatccactccagtgaggtttttgtccctactgttcctccagaattgtttgtcaaggctgttctcacttcatttgctccctaagggatctcgcctcaagtctcaggttcctaggaagctgact

SEQ ID NO: 2130 - DNA, 20 bp, Homo sapiens
ggatctcgcctcaagtctca

SEQ ID NO: 2131 - DNA, 20 bp, Homo sapiens
atgaagcagaagcgtggcta

SEQ ID NO: 2132 - DNA, 416 bp, Homo sapiens
ggatctcgcctcaagtctcaggttcctaggaagctgactcggagacggaggtttgcatgcagcaagtttatctggcagtactttggaatgaatactcgcaaggcacacaggatggtgcaaagggagatgctccactgtgatggtgttgcagcaaagactgtggctgacctccgggggtgctccagagctggggcagcctcatccgtaaggtggggtggggagtgctgagcagtgtgctgtggaggcattaccttgagtcttcctaatgtccttaaggaagaggttctgtcattgtccccattttgcaggtgcagaggtggaggctgagtgaattatacatcttgctcactgtggggagctgagactcaaatcaggtcttcctgcctcccagagccctagccacgcttctgcttcat

SEQ ID NO: 2133 - DNA, 20 bp, Homo sapiens
tcaaagcaagaggacatcca

SEQ ID NO: 2134 - DNA, 20 bp, Homo sapiens
cggacaggaagaaccagaag

SEQ ID NO: 2135 - DNA, 146 bp, Homo sapiens
tcaaagcaagaggacatccaactcagaattaaagcaaaactcctgttcctacccccacactcccctccccgccccatcccaaaggcatgggacataggaagtcagaggtaccaacttgggatttaccttctggttcttcctgtccg

SEQ ID NO: 2136 - DNA, 20 bp, Homo sapiens
aggtgtgcgatcactcttcc

SEQ ID NO: 2137 - DNA, 21 bp, Homo sapiens
tgcctgtttataaagccacat

SEQ ID NO: 2138 - DNA, 394 bp, Homo sapiens
aggtgtgcgatcactcttccctacatcacccagaaaaggttaagaaccattgcctcagggacagagtatgtagctttatttttttaaattattattatttgagacggagtctctctgtgttgcccaggctggactgcagtggtgtgatctctgctcactgcaccctccacctcctgggttcaagtgattctcctgcctcaaactccctaatagctgggattacaggtgcatgccaccgcacctggctaatttttgtattttcagtagagacaggctttcaccatgttggccaggctgatctcagagactcgcctgcctcagcctcccaaagtgctgggattacaggtgtgaactactgcacccagcccaaagtatgtggctttataaacaggca

SEQ ID NO: 2139 - DNA, 23 bp, Homo sapiens
tgtggctttataaacaggcagag

SEQ ID NO: 2140 - DNA, 25 bp, Homo sapiens
aagaatccctcttgagattctgttt

SEQ ID NO: 2141 - DNA, 379 bp, Homo sapiens
tgtggctttataaacaggcagagttaagtaactgcattctagaatcaagaatctagggaagggccgggcgtggtggctcactactgtaatcccagcactttgggaggccaaggcaggcagatgatttgagctcaggagtttgagaccagcctgggcaacatggtgaaacctgctctctccaaaaagtacaaaaaattagctgggcatggtggtgtgcacctgtagtaccagctactcgggaggctgaggcaggagaatcgcttgaacccaggaggcggggttgcagtgagccgagatggcgccagcttgggtgacagtgagacctcatctaaaacaaacaaacacacacacagaaaacagaatctcaagagggattctt

SEQ ID NO: 2142 - DNA, 27 bp, Homo sapiens
tcacagatacagagaattaatgatgtt

SEQ ID NO: 2143 - DNA, 20 bp, Homo sapiens
ttctgtgcaagattcggttt

SEQ ID NO: 2144 - DNA, 425 bp, Homo sapiens
tcacagatacagagaattaatgatgttaaagtattagtgtcatctgagaaggtagatatttttaatagtgattctttttcaaaatgtaaatgcatttattcattgaagaaaacttgaaaaaaatcttctggaaatcttccaaaaatcacctataatcccagcacccagaaataataactgtttttttaaaaaaagatttctccagtgtgtttgatgtctgtctgtctctctcattctctctttctctgtgtgtgtatgggcatgtacacacaaacctagaatcatactgattttaacatgatttttttatttatgtaatatctattttatgagcactgtctcctgttgttagttttctaaaacagtgtttttcaaactttgtttagtaatggaacccttatttttaaaccgaatcttgcacagaa

SEQ ID NO: 2145 - DNA, 20 bp, Homo sapiens
actctgcaattcagcctcca

SEQ ID NO: 2146 - DNA, 24 bp, Homo sapiens
gaaacaggtgaaccttaattctct

SEQ ID NO: 2147 - DNA, 242 bp, Homo sapiens
actctgcaattcagcctccacatcttgctcctctccctcctccactttcctctccttcctgtccatcaggactaagctactccggacggtacctcggccctcagatgttacagctgaggaaggacttacttttcatcaatgtatttatccctgagtttcactctgaggatgatgatgataatgatgacagtaatgagctcaatccttttatcttaggtagagaattaaggttcacctgtttc

SEQ ID NO: 2148 - DNA, 492 bp, Homo sapiens
ttatttgatcagagttgcattaatattcatagattaagtcaaggagaatgtatgtctttacatcactgaatcttttccaagcatgagctgtgtcttccctttaaggtctgtttaactacagggtgggtggccataaagggaaacatggacaaatatacctaatcagtggtttatttctatcacattacaatacatgaaactgtgttgtttttactaacaatgtatggttcagtgtactgtgcaaaactgcaataaatgccacatttccattgatccctgtacatgcatctaaaatatgctatgatcggaacatttgtgtctctgttttctgatggaatgaaactgcctttatggcatcccagaagtaatcaaaagggttttttctgtctaaaaaaaattagggctgggtgcggtggctcacacctgtaacctcaagactttgggaggctgaggcaggaggatcacttgagcccaggaggttgaggctgcggt

SEQ ID NO: 2149 - DNA, 21 bp, Homo sapiens
tgatggaatgaaactgccttt

SEQ ID NO: 2150 - DNA, 19 bp, Homo sapiens
actgctggagcaggtgtga

SEQ ID NO: 2151 - DNA, 370 bp, Homo sapiens
tgatggaatgaaactgcctttatggcatcccagaagtaatcaaaagggttttttctgtctaaaaaaaattagggctgggtgcggtggctcacacctgtaacctcaagactttgggaggctgaggcaggaggatcacttgagcccaggaggttgaggctgcggtgagctgtgatggcaccactgcactccagccggggtgacagaatgagaccccagctcaataaataaataaaattttaaaaaaatagtattatccctctttccaaaatttatggctactttgtgccttgataaaatgcgggctacaggggtagaggcagtccaggggcatggtcttattgaggggacaggtcacacctgctccagcagt

SEQ ID NO: 2152 - DNA, 21 bp, Homo sapiens
ggtggtggctcacacctataa

SEQ ID NO: 2153 - DNA, 20 bp, Homo sapiens
tcgaacacggactgatcaca

SEQ ID NO: 2154 - DNA, 368 bp, Homo sapiens
ggtggtggctcacacctataatcccggcactttgggaggccaaggcaggaggatggcttgaggccaggaatttgagacccgcctagggtaacatagcaagatcctgtttctaaaaaaaaaaaaaaaaatctatctatctatctatctatctatctatctatctatctatctatctatatctatctatctgtctaatatatatagtcccagctactcaggagactgaggtgggaggatcacttgagcctaggagtttgaggctgcagtgagctagaatcatgccactgcactctaggctgggcaacagagcaagaccctatctctaaaaaaaattttttttaaattaactgtgatcagtccgtgttcga

SEQ ID NO: 2155 - DNA, 20 bp, Homo sapiens
tggaagaactgcaggactga

SEQ ID NO: 2156 - DNA, 21 bp, Homo sapiens
ccatcacatggagaaaccttg

SEQ ID NO: 2157 - DNA, 179 bp, Homo sapiens
tggaagaactgcaggactgatatctctgaacttttggtcactagagaagaacacccaactcaaatcagtttttaaaaaaaaaaatatgtaggtaggtaggtagatagatactttacatctcttggttctgattgtttcttcttggttcatttttcagacaaggtttctccatgtgatgg

SEQ ID NO: 2158 - DNA, 20 bp, Homo sapiens
tggaagaactgcaggactga

SEQ ID NO: 2159 - DNA, 21 bp, Homo sapiens
ccatcacatggagaaaccttg

SEQ ID NO: 2160 - DNA, 179 bp, Homo sapiens; identical to SEQ ID NO: 2157

SEQ ID NO: 2161 - DNA, 18 bp, Homo sapiens
aagctgaggtggctcacg

SEQ ID NO: 2162 - DNA, 20 bp, Homo sapiens
tttgagtttggagctgatgg

SEQ ID NO: 2163 - DNA, 317 bp, Homo sapiens
aagctgaggtggctcacggtgtgtgtgtgtgtgtgtgtgtgtgtgtgtgtgtgtgtgtgcgcacacgtgtagggaagcaaaggacgtgctggctttagtgggcaggcctcctgccatggtggggccagtttgctggtagaagctgctcttccttgcagccctgcaggctgtagtgtccgctggactccaaattgtcaggttcatttctggtccagcctcaatctagggagcccgctccaggggagcaaagggacataaaccacataagacaggccgaggaggatcacagagaaaaccccatcagctccaaactcaaa

SEQ ID NO: 2164 - DNA, 392 bp, Homo sapiens
cagtagaatgaatgccacaatgaaaaaacgggcactggtggaatagtcagagagcaattgtaataaagaagattgctatgaaaaccagcaacggaggccaccttccagcaccccaggagctcaaataaatgcatrcgcagaaacaacagggatgaagtctggcaggaatgaattgttttcactccctttctagaggagagggagccagtaggccagaaaatgtggtgtctatggatggctggggagggaggaagtgacgggataggcctttggtgtcttaacagaggcttgtttcctccaggggacccagtaccctgggaggagtgagactgctccccagcttgttgtctgcagcagggctgtcagtgttgggcagtgacagggaggaattc

SEQ ID NO: 2165 - DNA, 255 bp, Homo sapiens
cagtagaatgaatgccacaatgaaaaaacgggcactggtggaatagtcagagagcaattgtaataaagaagattgctatgaaaaccagcaacggaggccaccttccagcaccccaggagctcaaataaatgcatrcgcagaaacaacagggatgaagtctggcaggaatgaattgttttcactccctttctagaggagagggagccagtaggccagaaaatgtggtgtctatggatggctggggagggaggaagt

SEQ ID NO: 2166 - DNA, 20 bp, Homo sapiens
tgatgccactgtttggttgt

SEQ ID NO: 2167 - DNA, 20 bp, Homo sapiens
gcccactctacgtgtgtacg

SEQ ID NO: 2168 - DNA, 143 bp, Homo sapiens
tgatgccactgtttggttgttttccttctacttatgttcttggtgttccttcaagctttttccactgctcttcctggaatgggccacggggatcatgtgtatatgtgtgtgtgtgcatgtgcacgtacacacgtagagtgggc

SEQ ID NO: 2169 - DNA, 20 bp, Homo sapiens
gaggaagagggaaggtgagg

SEQ ID NO: 2170 - DNA, 20 bp, Homo sapiens
gtgattcactgaagccaacc

SEQ ID NO: 2171 - DNA, 172 bp, Homo sapiens
gaggaagagggaaggtgaggggaggtgaggggagggagggagggaaggtggaagaaggaaggaagggagggagggagggagggagggagggagggaggaaggaaggggagagggagaggaaaagaaaagaaaaggagagaatcaacaataggggttggcttcagtgaatcac

SEQ ID NO: 2172 - DNA, 20 bp, Homo sapiens
cacacgctgtaatccctcct

SEQ ID NO: 2173 - DNA, 23 bp, Homo sapiens
aaacactttatatgcccaggaaa

SEQ ID NO: 2174 - DNA, 226 bp, Homo sapiens
cacacgctgtaatccctcctgctcccctgtaactcccaggcctggtgactccttaatccaagaacgaacataacctgaactcaggtatgcaagcctgcagcagctggggccggcagcttcctcaggtttattacccataaggtgtcagtgtgtgtgtgtgtgtgtgtgtgtgtgtgtgtgtctgtatgtgtgtataagcatattttcctgggcatataaagtgttt

SEQ ID NO: 2175 - DNA, 20 bp, Homo sapiens
cacacgctgtaatccctcct

SEQ ID NO: 2176 - DNA, 23 bp, Homo sapiens
aaacactttatatgcccaggaaa

SEQ ID NO: 2177 - DNA, 226 bp, Homo sapiens; identical to SEQ ID NO: 2174

SEQ ID NO: 2178 - DNA, 20 bp, Homo sapiens
atgctctcaccaggaaggtg

SEQ ID NO: 2179 - DNA, 20 bp, Homo sapiens
gctgggcctgagacatagag

SEQ ID NO: 2180 - DNA, 351 bp, Homo sapiens
atgctctcaccaggaaggtgtgagaagattcagtcccacagctgttgccgacactgggcattgtcattaaattaagtgtgtgtgtgtacaaatgtacatacatggtaaataaacattggtgactctgatacgtagttctttaatcattactgagattaaacacattttcatatttgtgtttaatttgcctcttcaaagcgctcccttccctgtcattttgggattgattattgagcatgcattttggccccaggctctcctgaggctttcctctttctggactgaggggctctgtttttccagcctgagctccgcccatggctcccccatcctctatgtctcaggcccagc

SEQ ID NO: 2181 - DNA, 538 bp, Homo sapiens
ggacactttaagcgcttttggatggtggggggatgcagcccaccctcggccctgccctgcagtggggctggtgcagtgtctcctgcacctagagcacccacctctctgagggcaaatccttgagcccacgcccaccccctcccactgaggaattatctccgagcaaagcctccactcaattgcccctctggggctgaatcacacatttccccctttgtgctgacccagcctacggggtgtgtaggtatctccttggccccattcattctgcccctgcaagtcctgccaggctcccgatggcattctgggtgcctgtgcccctcttctcccaggaggacaggatgagccagctatcccactgccaatgccttctggaatccgggccgtccttcttggtcccctgctggtcctatttccaaggctagctgggtttcctgtatccgagaggctcctgtgcctcagacctggtgtgatgaagtcagcaggccccagctcagtcttccctccccctcccttcactcagtctcctcacttataa

SEQ ID NO: 2182 - DNA, 716 bp, Homo sapiens
tgcagatggagacagccttcctgaggggccagggggaacagcccttgtaaaaactgaagccaagtcacagaggcccagggatcctcaggaacagctccctgctgtacaaatgggagtctggccctggtgcagaagtcccttctgctgccctgcccataggctttcgggggactctcctgccagtgacgtaactgttaatacccagcctggggcttttgctgattcctccagggcctggctaaaggctgacagccttatctcctagggaaaaaactgggtggcacagaaaatgggctttgggagaggtaggtttggaggagagcaagcaagaggagagagcctgactcaggagaagcaagcaccagagccctccaaggctgagggtgaaaatagatggagagtggaaatggggctcagcgcgccaggagggagccctgagtaggcggtgggtggtgggctgtgctccctgagaggacggaggggtggatgggggaatggaggctgcagccaaggtcttttacagtgacttgctcctaagcccagaccaagctggacattgtagccaaggtgtattctctgcagccagctagggctttgctccaggctcctcaggcccaggggtcagaagttctgggtaactccagatcagcagccccacggcaaagtggggctgagggcagaaatggttgcgtccaggagaggctagtggtgtgctg

SEQ ID NO: 2183 - DNA, 20 bp, Homo sapiens
caccagcaaagcagggataa

SEQ ID NO: 2184 - DNA, 20 bp, Homo sapiens
tccatttgtccaatccatcc

SEQ ID NO: 2185 - DNA, 398 bp, Homo sapiens
caccagcaaagcagggataataataactacttcttaggggtgctgtgagatttaaataacatttgtcaatgagctgaagtaaataaaagaaaaagaggcatggtgcccaaaaaactgccccagttccttgaggaagaagtatttgtcctgctcacggctggattgccagagcttggtacagaagtggtcagtaagtgtgtgctaatgaatgaatgaatgaatggaatgaggctctgttgaggcaagatgagcctctcctagaaggcactgactctaaccccagtcctaaccctggttcctgggctctaaaagggggcacgcattcaaggcagatgcatgccgatcttgttaaccttgcagatagaggaatcctgtcagggatggattggacaaatgga

SEQ ID NO: 2186 - DNA, 21 bp, Homo sapiens
cactgctggctatttgaatga

SEQ ID NO: 2187 - DNA, 20 bp, Homo sapiens
gcatccactctacccatgct

SEQ ID NO: 2188 - DNA, 422 bp, Homo sapiens
cactgctggctatttgaatgaaataatgcaataaatacttatcattactacataccaagcagggtttaggcacaggcgacacagcagtagacaacatacgtaaggtccctgaccccatagcacatatagtctagagggacagagaaacaagtaaaccaaaaaatgcacaagtttattccaagatagtaataggtgttatgtacaaataaaacgggacaacggaaagtcactaggaagatggtgtggaggggtaagggctaacttcagatggggcatcagttggcatttgatgcaagacttgggtgataggagtcagaaagattggggaagagctttctgggcagagaaagtagtgatgtaagatttcacagaggaatgaatgaatgacatgaatgaatgagcagcatgggtagagtggatgc

SEQ ID NO: 2189 - DNA, 401 bp, Homo sapiens
gtgagcatctctgaatactacccagcattcctgcaacagaccagtgtagatattgggattccacagtttgtataagattctatgtcaacagaccccgtatcagtgagtcagtgtttgcagccaacacggagtatgttgccccaagagcctgtggatggatcactcaggcttcccaacaaggacaaccgcctcacctccccstgcccatcaccagctttgataggcactccaacccccagccaccttctgcctagacaagctcctcttcctacttgggctctaactcctcactgcaggccactcctgcacagggatgccctactcatcctgctcatccataaaggtaactccacatttatgtgaccggctgtcctagtaacagttatgctgtttccacctca

SEQ ID NO: 2190 - DNA, 255 bp, Homo sapiens
gtgagcatctctgaatactacccagcattcctgcaacagaccagtgtagatattgggattccacagtttgtataagattctatgtcaacagaccccgtatcagtgagtcagtgtttgcagccaacacggagtatgttgccccaagagcctgtggatggatcactcaggcttcccaacaaggacaaccgcctcacctccccstgcccatcaccagctttgataggcactccaacccccagccaccttctgcctaga

SEQ ID NO: 2191 - DNA, 625 bp, Homo sapiens
aagctttaattattacctagataattcttcccacctacagtatttccagaaatatagaagagaggtaaatgataatttatggttttttagtagtttcagagtgttaaaaaccgtaaattatcatagcttgaaaacctgtaactatttgtttgtttctaatgttgaaaattttttggcctctgaaaaactttcagaatcaaatttaggatttaaaactattttccccaggtgactttggttatgtcctttttgttctttgaatattcaggagaaataaggtattgtttccaaagaggtaacccactgccacagcacatcctgtgatttgggccgttactcctcagaccagagactgggtccrtttttggtttgtagatggttgtgtgctcatagtttctattaaatttacatggcagtgacctaggacttttttaaattaattctttttaaacagcgtaggtggaaatggaataaataagattctactttgtaacatgactaaacccagagcaaactgaccatgcattaataataaaatgtaggcatgaaaatttgtatttcgtatacttaaagtcagagtcagatttttccagttttctgatctgtatgttttttaaataagctt

SEQ ID NO: 2192 - DNA, 625 bp, Homo sapiens; identical to SEQ ID NO: 2191

SEQ ID NO: 2193 - DNA, 20 bp, Homo sapiens
caagcagctctggaaagtca

SEQ ID NO: 2194 - DNA, 23 bp, Homo sapiens
gggaaagcagatatttaggatgg

SEQ ID NO: 2195 - DNA, 997 bp, Homo sapiens
  misc_feature 501: n = A,T,C or G
acagacagacacacaagcctatagtgtttgagcttaaccagaatatataagggatacctgtaaaatatttccatactgtaacaaaataacatgtgacaaataagaagagaatatttataaaacaacaagcagctctggaaagtcactcattatatacattagtttaaaaaaaaaaaacacctaatacttgtagcaaggaggatactatatacataattaatgtttaaaatgttcaaccggccaaggcggattacttgaggtcaggagctcgagaccagcctggccaacatggtgaaaccccatctctactaaatacacaaaaaattatctgggtgtggtggcccatgcctgtagtcccagctacttgggaggctgaggcacaagagaatcacttgaacctggggggcggaggttgcgtaagccgagatcgcattactgcactccagtctgggtgatagagcgagactctgtctcaaataatacataaataaacaaacaaantaaataaaatgttcaataattatggtccatcctaaatatctgctttccctcctaaaattagcaattcaataaatttggagggttggaagtgataaaggcagggcctggggtggatggactattaaaaaaaaaaaatttggaggggaaaaacccagttcctaaatgagacatttttctaccccttgattagtgttaaactcaccttccatgcattcattcacagattcgtagtcagcataagttctgccttctggcctcttggtaggctgtaccagcaaaatggtgtgagactgcaggggaaaacatgatttcaatataagtttctatttgagaaattcatagtatgataaaaaaaaatccccatttgtaatgcaataatgattgctagttattaaaatgtaattagagaggccaggcatggcatcccatgcctataatcctcatcctctgggaggctgagagggggaaaatcacttgaggccagaagcttgagacc

SEQ ID NO: 2196 - DNA, 2001 bp, Homo sapiens
agaatagttagacaaccctggcccattgttcctacagcaggctagagcatttggagggaaaaataccatatccggcagggcccggtggctcacgcctgtaatcccagcactttgggatgccgaggcgggtggattgcttgaggtcaggagttcgagaccagcctggccaacatggtgaaacgccgtctctgctaaaataaaaaaattagccgagcgaggtggcgggcgcctgtaatcccagctactagggaggctgagacaggagaattgcttcaacccaggaggcagaggttgcaggggtctgagatcccgccactgcactccagcctgggcgatagagtgagactctctatctcaaaaaacaaaacacctcccccacgtctccctctaccgagtaacaatcgggagagagttcatcctcaggcccaaggcacgccggacccgagcgagcaggcgggcgcgcaaccgcagggcggaccggggctccgaggcctagagtcaggcctggcgtccctgcggcgggaagaagggtcaatccaccgactagagtggcggggagcatcacgcggcgctgcatggggctcgtggggaggggaaaacgtatggggctggggtcgctctggaggccggggactcggactcgggtagccgcggaggcctttctcaccatcgcgccaaactctcttcgctacagcagctgccgacaccgccgccgttacacgagcttaactacaacgccgctaacagccaatcctcgcgagaggagccgccggaagtcgtcgaaagtgcaacgcaaaagagccttttggatcatagaggcacagtcacttccggcagctagagcagctactgactctgtttcagccatcttcgataaaggcaaaaaggtaagggaaagtttccaagctttaggaagaattattttttttcaagacgctgtcttccgtactttcgttattaaacatacggctcaagtgatcaccggtatagacagtgacatcagacatctttcattagccctactcaaaaatggcggcaacgtaagtatcctgggccggaggtcggttgtaacccggaagtgcctttgtaaaggagggggtggttagacaatccggaagtggatggaatgaagagatgccacttggcggccatggcagctgtagtatcggcgactccgggtcaaggcccggtcgagtgcagtaccatgggcagcaccgggtatagggcagagacagctttgtgtcaactttgctgctgaacccctaggacccatcgttagagacctgcaggactcctttcctcatcccaggctcggaggagagtttgctgggactggtgggctggtttcctgctctggggggcggatcaccttcggggccgcctcttggagacaggggcgcctagggaacgaacaggttcgcttgagtcacttacccgccgccgcctaagacattgtgccaccctcaatccgacaatcgaagaaatcgatcattcgcacattttccccattgacttttcccatctctgttaacccacgagaatctaatgactggcatctgagaacccagagcctgggaccttagattgctgtaagctttctctggtgctaatatcagcaaaaagggtctgttgccgggtacgttcaagaggaaggtgcctcgtgaacacatctgctggtgggaaggcctaaagaactggaaagcccactctcttggaaccaccacacctgtttaaagaacctaagcaccatttaaagccactggaaatttgttgtctagtggttgtgggtgaataaaggagggcagaatggatgatttcatctccattagcctgctgtctctggctatgttggtgggatgttacgtggccggaatcattcccttggctgttaatttctcagaggtaagaaattctcaattttctgtcagctgtcaggatggctgtgagatagtagttttagttgcaaagggaagctgcttccctagttaaatctcaaagctg

SEQ ID NO: 2197 - DNA, 23 bp, Homo sapiens
ttgtgaacctgctatgtttcctt

SEQ ID NO: 2198 - DNA, 20 bp, Homo sapiens
accaacccaaatctcacaca

SEQ ID NO: 2199 - DNA, 104 bp, Homo sapiens
ttgtgaacctgctatgtttcctttgacataaccatattttcttataactatattagaattgaattgacattagtagggctgacatgtgtgagatttgggttggt

SEQ ID NO: 2200 - DNA, 20 bp, Homo sapiens
atgtgtgagatttgggttgg

SEQ ID NO: 2201 - DNA, 22 bp, Homo sapiens
cgtcaatttaagaaagccacaa

SEQ ID NO: 2202 - DNA, 294 bp, Homo sapiens
atgtgtgagatttgggttggtttgtgtatttttaaacatattgaagtaacatttatgaataatcataattaattctgataagcaaccagtaaaactttttatttctataaaatgcctttaactttaccaattccagtattttttcaaactaccttgaatgattattgcaatatgcggatatatactatttcctttttcactagaaggaaatgtttacaggagtggtgttaataactgggtcattaatacagataattagtatgtcatgtcatttgtggctttcttaaattgacg

SEQ ID NO: 2203 - DNA, 560 bp, Homo sapiens
ggaagaaggccacaaaagtatcaagaaaggtagttttggggtgaggagaaactgacagagaaatcaatgtcacataaacctcttggtgggcacatctggcaggtagaccccaccactactgcaatttcagactacctaattttaactcgtttttaaatactaatcttgccataattgatcatctgacttttattcctgttctgagawatttttagaaaaagtattgaatgagaaagcagcagcaagattaaaaacatgaataaaaagcatatcttttcatgtaaatcaagcttgtccaactcatggctcgtgggccgcatgcaacccaggagcactttgaatgaagccttacacaaattcataaactttcttaaaacattatgagtttttttttgcattttttttttttagctcatcacctatcttagtgttagtgtattttatgtgtggcttgagataattcttcttctgatgtggcccagggaagccaaaagattggacacccctgatgtaaacgaaagtgaactgtaaaacagtaacactagcctctaagaaagcca

SEQ ID NO: 2204 - DNA, 26 bp, Homo sapiens
tttcagtatacaggaaagagaaacac

SEQ ID NO: 2205 - DNA, 20 bp, Homo sapiens
ccttaccaaacagggcttcc

SEQ ID NO: 2206 - DNA, 418 bp, Homo sapiens
tttcagtatacaggaaagagaaacacttttaacttttaaaggaggccagccaggtgctaagtggctcacgcctgtaatcccagcactttgggaggctgaggtgggcggattacctgaggtcaggagttcgagaccagcctggccaacatggcgaaaccccatctctactaaaaatacaaaaattagctgggcgtggtggcatgtgcctgtaatcccagctactcaggaggctgagacaggagaattgcttgaacccaggaggcggaggttgcagtgagccgagtcccaccattgcactccagcctggggaacaagagcaaaactttgtctcagaaaaaaataaaaataaataaataaaaataaataaataaaggaggccaaagcatgctttacacaaaggaagccctgtttggtaagg

SEQ ID NO: 2207 - DNA, 21 bp, Homo sapiens
tggaaagaaatcatcagcttg

SEQ ID NO: 2208 - DNA, 21 bp, Homo sapiens
gcattcattaggaaaggcaac

SEQ ID NO: 2209 - DNA, 427 bp, Homo sapiens
tggaaagaaatcatcagcttgtcttttctcagattgaactacagattattgtttcataaggatccttgataaaactaagtttggatcaaataaaatccggttgcaatatgattcaatattattttcctgaaaaactttgttttctccaggatactatattgataaacataattaagacttatctgcataataatattaataatgtttattgagctctttctgtataccaggcaatgatatgcactatcttattaatcctcaggaccaagactatgagatactgttaaacctcactttacaaatgagcaaactcaggcttgaagaggtcacagactctggtagaggtgtgatttggaactaagtcattttgattcctgttgccaaatcagtcacttgactactaaatgttgcctttcctaatgaatgc

SEQ ID NO: 2210 - DNA, 19 bp, Homo sapiens
agcctgggcaacaagagtg

SEQ ID NO: 2211 - DNA, 21 bp, Homo sapiens
aactatctattgcaaaccctg

SEQ ID NO: 2212 - DNA, 339 bp, Homo sapiens
  misc_feature 256: n = A,T,C or G
atgccattgcagtccagcctgggcaacaagagtgaaatttggaaggaaggaaagaagaaaggaaggaagaaaggaaggaaggaaggaaggaaggaagggaaggaagggaaggaaggaaggaaggaagggaaggaagggaaggaaggaaaggaaagaaaggaaggaaggaaattaacgtcagataaatacagggtttgcaatagatagtttgatgtaattatctattagttaccctcaagaccttttcatttaaaantgaatttccatgtaagattttccagggctgggtgtggtggctcatgcctgtaatcccagaactttgggaggccgaggcaggca

SEQ ID NO: 2213 - DNA, 19 bp, Homo sapiens
ccagcctatggccctttat

SEQ ID NO: 2214 - DNA, 27 bp, Homo sapiens
gattcagaattgatagtttcactcaag

SEQ ID NO: 2215 - DNA, 405 bp, Homo sapiens
ccagcctatggccctttattaaatgtatttgccggctgggcacagtgactcacgcctgtaatcccagcactttgggaggccgaggcgggtggatcacgaggtcaggagatcgagaccatcctggctaacacggtgaaatcctatctctactaaaaatacaaaaaattagccgggcatggtggcgggcgcctatagtcccagctgctcaggaggctgaggcaggagaatggcatgaacccgggaggcggagcttgcagtgagccaagatcacgccactgcactccagcctgggcgacagagcaagactccatctcaaaaataaataaataaataaataaataaataaataaataaataaataaatgtatctgcatgccccttgagtgaaactatcaattctgaatc

SEQ ID NO: 2216 - DNA, 25 bp, Homo sapiens
aaagctttatgatgtgctcactgta

SEQ ID NO: 2217 - DNA, 20 bp, Homo sapiens
ctcagcaacaccgagagaaa

SEQ ID NO: 2218 - DNA, 122 bp, Homo sapiens
aaagctttatgatgtgctcactgtattgtccttattttattttgtcatgaaccattagaaactgtcaatagagaagaattacaactatttatgattttgttttttctctcggtgttgctgag

SEQ ID NO: 2219 - DNA, 201 bp, Homo sapiens
tcgctgtctattgtagatgttggtctcacaaatgagcagctcacagtcttgattacagatacttgagaaactttttcccattaattaatcaaagtttgcarttatttcttttgctttctccccaggaacgactgaagctggtgactgttttgggtgctggccttctctgtggaactgctctggcagtcatcgtgcctgaag

SEQ ID NO: 2220 - DNA, 21 bp, Homo sapiens
ccaagggtttaggatcgtacc

SEQ ID NO: 2221 - DNA, 20 bp, Homo sapiens
taagggaatgcaacctgtgg

SEQ ID NO: 2222 - DNA, 335 bp, Homo sapiens
ccaagggtttaggatcgtaccctctcatgggagcttaagaccccaagtcctgccttggggcaggtgaaaagagggcaggagaaggtcagaagcctgctgttgaggcctaacacacccaacagtataacaaaagactgcaacaaaggctatgtaagttatgaaccaggaactgtggacaaaaaccaatatatacacataacgtttgtgtgtgtgtgtatatgtttgtaagtgtatagtgtatatactatgtatatatgtgtttacatatatacacatatgtacacacatacacacacacacatacataaaataacaccacaggttgcattccctta

SEQ ID NO: 2223 - DNA, 356 bp, Homo sapiens
caaattttggctgcacagtaaagtgctgcattacccaacaatctttgaagttcttaacacttgtttctatagacagtttttttttacgtgaaagctgataatcatctaattccagtgattttagagctataattacagaagagtaagaggttcctttttacattaattagtatttaataatgcttattaaagcatcagagmacttagttaacatgatatactgagttctgaaaacaatgtattataattataaggtccacagaagaacgaaaccataggctgtagtaacatgtatacaaacgtctttcttgaagtacgaagaaaagttgttttggtctacaataaagaaagagggg

SEQ ID NO: 2224 - DNA, 21 bp, Homo sapiens
tcttgggtagagttgggagaa

SEQ ID NO: 2225 - DNA, 20 bp, Homo sapiens
gggttctttcttgccttcct

SEQ ID NO: 2226 - DNA, 221 bp, Homo sapiens
tcttgggtagagttgggagaaaaccataaacaaatactgaactcgttgttgttgttgttgttgttgttgtttgtaatggaatgggcaaaacagttctgaagctgctttagatgttttataggattgagtcaatgggtcatgttgatgttggtggagtcagggttctaagtgtggaagaaggaacacacaagtatggagtggaggaaggcaagaaagaaccc

SEQ ID NO: 2227 - DNA, 20 bp, Homo sapiens
gaatccatgagcccatctgt

SEQ ID NO: 2228 - DNA, 21 bp, Homo sapiens
aagcagaatgcttgtgacctt

SEQ ID NO: 2229 - DNA, 318 bp, Homo sapiens
gaatccatgagcccatctgtgatatatatatatatatatagagagagagagagagagagcgagagagagagagagagcacttgcttatagtagaatgctccaattattaaatgtagaaagagtgctggagttggaaaaatactcatttttgcaaccctccttaaaggttggctcaggcacgcatcatcaatgaatgttaaatgtagggggcaaatttttatttccttattggcttcaaggggaaagaagtaactaaatgaagaaatcagatgataccttgatcggatagtcaaaattaaggtcacaagcattctgctt

SEQ ID NO: 2230 - DNA, 20 bp, Homo sapiens
aaggggcaagtggctctagt

SEQ ID NO: 2231 - DNA, 20 bp, Homo sapiens
ccccttcctttcttgcataa

SEQ ID NO: 2232 - DNA, 101 bp, Homo sapiens
aaggggcaagtggctctagtttccctctgacatcctgctctgtgtgtgtgtgtgtgtgtatacacatgtgtgagtgtttgcttatgcaagaaaggaagggg

SEQ ID NO: 2233 - DNA, 20 bp, Homo sapiens
gctcagcgtttgtactctgc

SEQ ID NO: 2234 - DNA, 18 bp, Homo sapiens
ggtggtgggcacctgtaa

SEQ ID NO: 2235 - DNA, 214 bp, Homo sapiens
gctcagcgtttgtactctgcctggttttgttttttggttttttttgtgtgtgtgtgggttttttgttttttgtttttgagatggagtttgctcttgtcacccaggctggagtgcaatggtgtgatctcggctcactgcaacctccgcctcctgggttcaagcgattctcctgtctcagcctcccaagtagctgggattacaggtgcccaccacc

SEQ ID NO: 2236 - DNA, 201 bp, Homo sapiens
ccagctgcttttggactggtttccttcttgatgcatgctggcttagagcggaatcgaatcagaaagcacttgctggtctttgcattggcagcaccagttaygtccatggtgacatacttaggactgagtaaggtaagctaatctattcccagctatctaaaccagtgtcttgtgatctcttagaatttatgatctcttaga

SEQ ID NO: 2237 - DNA, 586 bp, Homo sapiens
tgaaaatcctctgtagttgttctgcagaggaaccttccttccattagaaaatttctgctcaatacagaatggtccacatcacccaaagtgcactgttggagatgctgtgaaattaaaacctctttgtacctgagacatctagattcacctcaggaggcctgaaggaaatgtgtaacttgtgggaaagaactagacaaccatttaggaattctctagatatactcagcctaacccagtggcttaacacaaggagattggctttgatctttttttcttgtggcatcttccagcaagttagaagtctcatgggataagactgcagttcccctggttcartagctggaacagtgattttaaatgtccctttttctggatcccttgtaaacatgaaatcattccatggatggctgccttataattttgtctctttccactttaattgtgaatggttaaaaaaatgctgttttctgatattaaatttttattagtgcataccttaatctgagtggctcattacttatccttttggcagtttgtttgatgaccagaattgacctgtatttgaacatcagaaaagagaatgaaa

SEQ ID NO: 2238 - DNA, 27 bp, Homo sapiens
ccctcaaatttcaactgtaattatctc

SEQ ID NO: 2239 - DNA, 20 bp, Homo sapiens
gcttatgattgcaccactgc

SEQ ID NO: 2240 - DNA, 220 bp, Homo sapiens
ccctcaaatttcaactgtaattatctctggattgtggaattgtgagtaatgtttgatttattctttttattataagtgctttcacatttgtcgacaatcaccatatatttccttccttcctttctttctttctttctttccttccttctttctttctttcttttctttctgggtcttgctttgtcacccatgctggaggggcagtggtgcaatcataagc

SEQ ID NO: 2241 - DNA, 24 bp, Homo sapiens
tgtcgacaatcaccatatatttcc

SEQ ID NO: 2242 - DNA, 20 bp, Homo sapiens
gcttatgattgcaccactgc

SEQ ID NO: 2243 - DNA, 132 bp, Homo sapiens
tgtcgacaatcaccatatatttccttccttcctttctttctttctttctttccttccttctttctttctttcttttctttctgggtcttgctttgtcacccatgctggaggggcagtggtgcaatcataagc

SEQ ID NO: 2244 - DNA, 20 bp, Homo sapiens
cctgagagaagctggctttg

SEQ ID NO: 2245 - DNA, 21 bp, Homo sapiens
gggtgagtggctctagtttcc

SEQ ID NO: 2246 - DNA, 130 bp, Homo sapiens
cctgagagaagctggctttgcaccagctcggtcctcttccttcctttcttgcataagcaaacactcacacatgtacacagagagagagagagagaggaggatgttagagggaaactagagccactcaccc

SEQ ID NO: 2247 - DNA, 20 bp, Homo sapiens
ggccagggactagactgtga

SEQ ID NO: 2248 - DNA, 20 bp, Homo sapiens
gcagtgagctgagactgtgc

SEQ ID NO: 2249 - DNA, 315 bp, Homo sapiens
ggccagggactagactgtgaagggtatttgtattagtctgttttcacgctgctgataaagccatacctgagactgggcaatttacaaaagaaagaggtttattggacttacagttccatgcggctggggaagcctcacaatcatggcggaaggtgaaaggcatgtctcatatggcagcagacaagagaagagggcttgggcggggaaactcccctttattttatttatttatttatttatttatttatttagagacaatgtctccctctggtgtcacccaggctggagtgcagtggcacagtctcagctcactgc

SEQ ID NO: 2250 - DNA, 20 bp, Homo sapiens
cccattctaggcctctgtgt

SEQ ID NO: 2251 - DNA, 20 bp, Homo sapiens
ggctgagctgagcatctttc

SEQ ID NO: 2252 - DNA, 160 bp, Homo sapiens
cccattctaggcctctgtgttctcagttctgggaatacacaacacacacacacacacacacacacacacacacacacacacacgctatttagtcttgggtcagtgacagagccagccagagagggcctgggtgtgggggagaaagatgctcagctcagcc

SEQ ID NO: 2253 - DNA, 21 bp, Homo sapiens
ggtgccttgagtctaccacaa

SEQ ID NO: 2254 - DNA, 20 bp, Homo sapiens
gccttggtgacagaaggaga

SEQ ID NO: 2255 - DNA, 154 bp, Homo sapiens
ggtgccttgagtctaccacaagggaatggggaacaggggtacagctccaagactccccacccacttcaagcaatacctctgcactgttatatatattttttgtttgtttgtttgtttgtttgtttgagagagagtctccttctgtcaccaaggc

SEQ ID NO: 2256 - DNA, 20 bp, Homo sapiens
ctccaactctccctgcatgt

SEQ ID NO: 2257 - DNA, 20 bp, Homo sapiens
ggtgtgagcagaatgtggtg

SEQ ID NO: 2258 - DNA, 125 bp, Homo sapiens
ctccaactctccctgcatgtaaactttaaactctcatacgtgcacacacacacacacacacacacacacacacacacacacactcacaccagctttcagaatcgccaccacattctgctcacacc

SEQ ID NO: 2259 - DNA, 523 bp, Homo sapiens
ctgcagattgccagctttcatgttacttgccaaagacccatcttagcatcttgcatcttcttgcgttccttttcctagaggagaccctaagtggctggaggtgagagctcaaggggctgaaggtgtccaaggggaagaaccacagctctcctgctgtgctgagccagggtggtggttcagcgggacagaggcagccagacctggaagccagtagtggggttcccgctccagctggccacctgtgcaggggcccagctgcctgtggggacgtcactggccagctgaggcctttgtgagggtgtggagcttgagttggtaaggatggctgagctggtgtccctgtgggctcccatgtgagtccagggcccccaagggtgctcttgttgtcccaagaaacctcaccccttctctcctggttgcttttccttccccaccgcccactataggtttttcatcatcaaagagagctttctgctttactactctgagagcgaaaaaaagagctttgaaaccaataaatact

SEQ ID NO: 2260 - DNA, 21 bp, Homo sapiens
tcaggacctcagagcactttc

SEQ ID NO: 2261 - DNA, 20 bp, Homo sapiens
ccttggtgtgcacctacctc

SEQ ID NO: 2262 - DNA, 133 bp, Homo sapiens
tcaggacctcagagcactttcctgattgtgtgtgcatgtgtgtgtgtgtgcttgttttggcagacaaactgatggaagagaccgaagaactctgccttcagagggagcagagagaggtaggtgcacaccaagg

SEQ ID NO: 2263 - DNA, 23 bp, Homo sapiens
ttgcatttgatctacaatcctga

SEQ ID NO: 2264 - DNA, 20 bp, Homo sapiens
tgccctgtctcaaacaacaa

SEQ ID NO: 2265 - DNA, 82 bp, Homo sapiens
ttgcatttgatctacaatcctgatctgattttatttatttatttatttatttatttatttgtttgttgtttgagacagggca

SEQ ID NO: 2266 - DNA, 20 bp, Homo sapiens
cacacaaagcaactgggaga

SEQ ID NO: 2267 - DNA, 20 bp, Homo sapiens
agcccttgtgagcaactctg

SEQ ID NO: 2268 - DNA, 945 bp, Homo sapiens
  misc_feature 447: n = A,T,C or G
tcctgaagccctcagataaagtccagcagtccctgtggaactgtgtgcttctgcaatcagccatgttgacacttctcagacccccaggccttgcaaggtctctccaaagtcagaaactctgcagctttgactcttggagaaaaagctgctgacttctcttatctcaccccacccctggcaaacaggagttgagggatgtcttttgcaaggctttaggagagattacaatggttgtttttacctcctgaaagagagccactcccagacacacaaagcaactgggagaaactggttattcaaacttccgagtgggtgtggaatgttgtggtgtcaacatccccaggttcagttctcctggctcggcacatcccatctcccattcccttccctggacgtgggcttccacccatggcttacagctcttctgacccagaaatgaacttcacntccatcttactgggttaaaggtgttcatgggaaatataggaaatactctaagtccaggagtcctggggggtggggaccttaataaccaaatcccttgtggtgaactttacctgtcactgtcaactctgagtatgcctctggctgagacttgacagttgggcagggaagttggggtgagtcagagttgctcacaagggctcaacagcaggggctccaggagacatccaggcagtttcagagccagctgcatttgggggctcatgctctctttgcactccaccacccttcccctggaggatctgacacctgcctctgggctgagagtcccattgtgaacagactcagcctccccttgtaatcctggcaaaagctgtggttggtgggccttggagtgtccacaaagagagccttcccccttgcagagcagtgactccagtggcaagacgagacctaggggaagaagttgttgtgcactgtctgctgctgtgggtgcggggg

SEQ ID NO: 2269 - DNA, 610 bp, Homo sapiens
ctgcatttgggggctcatgctctctttgcactccaccacccttcccctggaggatctgacacctgcctctgggctgagagtcccattgtgaacagactcagcctccccttgtaatcctggcaaaagctgtggttggtgggccttggagtgtccacaaagagagccttcccccttgcagagcagtgactccagtggcaagacgagacctaggggaagaagttgttgtgcactgtctgctgctgtgggtgcgggggaaggctctgctttgccacttgctggctcctgtggcttttgaaaagtcactatttaaaatgtttactgtatttatgcatttttagtaagcaggagagaaatcccttcaatcttacaggctgctcagagcctttgtggttctgaagttctatgattgggactttgcatccctgaaatcaacagaaaattggctgccactgctacmagtgatcaagaacatacaggatgtcaggttctggctcaggtagcactcaatgccatgccatccttagaactgtctatgaaaatatatgtttgctttgagatgagaataggaaagataactaatttatcacctcaaggaaaaggtaactgtgac

SEQ ID NO: 2270 - DNA, 610 bp, Homo sapiens; identical to SEQ ID NO: 2269

SEQ ID NO: 2271 - DNA, 21 bp, Homo sapiens
aggactctgctttgtccatca

SEQ ID NO: 2272 - DNA, 21 bp, Homo sapiens
aggagaccagcagttaccaaa

SEQ ID NO: 2273 - DNA, 389 bp, Homo sapiens
aggactctgctttgtccatcacttactgagtccattatataccatgcactttcacattgacttctcttctgtattcacatatctttccttgatttacagaaaaaaatggaacccacatagtttgggggacttgcccaaggtcacacagcttgtaactggaaggtcagcttgtatctgagttcaagggcagtgctttttctagcatcccctaaaaaaatgtaaaaattttaagtgacttttttccattgccttattcattcattcagtcattcattcagtaaatatattgagctcctctatattttaggtcccaagaatcttcactcagagattttctatcatgagttcttaagggattaactcagctgtttggtaactgctggtctcct

SEQ ID NO: 2274 - DNA, 20 bp, Homo sapiens
aatgctaattcgtggccttt

SEQ ID NO: 2275 - DNA, 20 bp, Homo sapiens
gcgtggatgatcaaagtcag

SEQ ID NO: 2276 - DNA, 399 bp, Homo sapiens
aatgctaattcgtggccttttaaaaaataagcataaggccgggcgtggtggctcacgcctataatcttagcactttgggaggctgaagtgggtggatcacgaggtcaggagttcaagaccagcctggccaagatggtgaaaccctgtctctactaaaaatacaaaaaatcagccgggcgtggtgcatgcgccttataattcctgctaccccggacgctgaggcagagaattgcttaaacctggagggtggaggttgcagtgggccgagatcaccccactgcactccagcctgagcgacagagcgagactctgtctcaaaaaataataaataaataaataaataaataagcataaaaatgtgagattagagctacaagatctgactttgatcatccacgc

SEQ ID NO: 2277 - DNA, 19 bp, Homo sapiens
ctcaactccgatgcactcc

SEQ ID NO: 2278 - DNA, 20 bp, Homo sapiens
ctctgcgaggagatgaggtc

SEQ ID NO: 2279 - DNA, 165 bp, Homo sapiens
ctcaactccgatgcactcctgaggggaggggaggtgctttgcctggccgccccttctcctggaatcctgtctcggccgcttcccccacccctgttcccgggcttgtctcaaccccacccagtggctgctgctgtctgcgcccgaggacctcatctcctcgcagag

SEQ ID NO: 2280 - DNA, 2001 bp, Homo sapiens
ggagccaggtgcagctggggtgtgtgactgtgaggctccttgctgtccatgacatactgtcacccccactgccttagcttactccccagtcaccccttgaggtaacagggctggtgcttttacaattctcattttaaagatgaggaaataggctgggtgtagtggctcatgcctgtaatcccagccctttgggaggccgaggcaggtggatcatttgaggtcaggagttcgagatcagcctgaccaatatggtgaaaccctatctgtactaaaaacacaaaaaaattaccagagtgtggtggtgcacgcctgtaatctcagctactcgggagactgaggcccgagaatcgcttaaacccagaggtggaggttgcagtgagccgagatcacaccagtgcaatccagcctgggtgatagagtgagattctgtttcaaaaaaaaaaaaaaaaaaaaaaaaaaaaaaagatgaggaactagaggtcagtgagtgctggcctcaagagaaccttgaaatcccactctgcctagccctgaccacccttgtcttcaatccttgaggaacagaatgatgccaggtgtaagtcattcaggtatctccccagtacctctacctggggaggagataatgttctcggcctacatggtggggagggtgaccacggtgcggggtgaggggaaggctcttctgccatgccttgggacttccctttctgtgtgagtgtgaggtaggtggattgcgcctactcagcatggattttgcacagaaagtcttgctcgcttttccttggtgtgatttttattgaactcacctttccttactaagggagtgttaagttggtttgggtttcaggagaaaagacacatagcctacttaggtgagccccccagcctacattaaggaatctcttacatgggacagcctggtccacccaggcaaaaattttcagtaataaataatttgcatttgcccaccctatgatgggacaggagtggaggatacagtttctggccagatcccatgatcctgtcctcatccctcaacatgcactagggaccctcccatgctcccactaccacaaaaggcagaattggggctggaacatctgacccaagtccacacctgtttcctctcctcttccgcatttctgagtcttaaagcgatgctgggccaaagtgggggtggtccttggccgtcctgggaggagctttgcacactggctctaagttcctatttcggttgatggttctatagtggatgagctccacactcaattcttatacccctgcagctgccataggaggcagggtgacctgtcaccaaggcagctcccacaacctggtcacagctctttcctcagggcctgttacccagcatgagctaaagtccttgggagcttctaagaccacttgaaggaggaaatttattctgtgtctttccttctctctttctccctccctccctgtcttcttttatctttccttcccttcctttttcctcccatccattcactcaaatctaggcgatgcatccctgtagtgtgctagctattgtttctctaggtgaagaggcatcagaaacagaatacttcccctgagtcaggagcagcactgaattattcataggccaatgtattgcaagttttagagggaattttcttcaaggttgtggctgtgaggctgcagagtgaaaggagtaatgaatatgcctaacactcacagaggtgagaaatgctgcctggactcacacagcccagggtctcaggctcacgcagccctgggacaatcacagtgaagagaaatgccctgaatagagaatcacactgtcttggccttggtggatggaaccctaatctctctgaactcttcaatctgtgggttgatggattaaacacacatgtattcaacataaatggatagctgggtctcctcgaactctacacctgtatggaatccatttcctcttgttctggaccatttagaagggcacgtgggtaactggag

SEQ ID NO: 2281 - DNA, 20 bp, Homo sapiens
gtggatgagctccacactca

SEQ ID NO: 2282 - DNA, 20 bp, Homo sapiens
ggatgcatcgcctagatttg

SEQ ID NO: 2283 - DNA, 280 bp, Homo sapiens
gtggatgagctccacactcaattcttatacccctgcagctgccataggaggcagggtgacctgtcaccaaggcagctcccacaacctggtcacagctctttcctcagggcctgttacccagcatgagctaaagtccttgggagcttctaagaccacttgaaggaggaaatttattctgtgtctttccttctctctttctccctccctccctgtcttcttttatctttccttcccttcctttttcctcccatccattcactcaaatctaggcgatgcatcc

SEQ ID NO: 2284 - DNA, 20 bp, Homo sapiens
tgaccaggtccatgaagtgt

SEQ ID NO: 2285 - DNA, 20 bp, Homo sapiens
gaagtccaccaggactgctc

SEQ ID NO: 2286 - DNA, 425 bp, Homo sapiens
tgaccaggtccatgaagtgtagtagcagttgtccccactagactatttttgcctggaaaacctaggcaaaaacagaggctttggttaaaaaaaaaacaggggtggggtggggagaggattcacagatcaaatgtaattggaaaaggcatgcaaactttttcaatttatacacagctacagaggtctatttacagatctgggatggggttgggcttaatggctcatgcctgtaatcccagcactttgggtggctgaggtgggaggatcgcttgagcccagaaagttgaggctgcagtgaaccatagttgcaccactgcactccagcctgggtgacagagtgagaccctgtctcaaaacaaacaaacaaacaaacaaacaaacaaacaaacaaacgaatctgggatggagcagtcctggtggacttc

SEQ ID NO: 2287 - DNA, 20 bp, Homo sapiens
gcttaatggctcatgcctgt

SEQ ID NO: 2288 - DNA, 20 bp, Homo sapiens
gcatctaactgctgccaagg

SEQ ID NO: 2289 - DNA, 357 bp, Homo sapiens
gcttaatggctcatgcctgtaatcccagcactttgggtggctgaggtgggaggatcgcttgagcccagaaagttgaggctgcagtgaaccatagttgcaccactgcactccagcctgggtgacagagtgagaccctgtctcaaaacaaacaaacaaacaaacaaacaaacaaacaaacaaacgaatctgggatggagcagtcctggtggacttctctggtcattgtgtagaaggcgctatgcagcctacaaggaccaaggtcttgcagccaactctgaaagccagggctctggctcccagccagcctttccttgaagacatttcttgagcgcattgcccttggcagcagttagatgc

SEQ ID NO: 2290 - DNA, 20 bp, Homo sapiens
gcttaatggctcatgcctgt

SEQ ID NO: 2291 - DNA, 20 bp, Homo sapiens
gcatctaactgctgccaagg

SEQ ID NO: 2292 - DNA, 357 bp, Homo sapiens; identical to SEQ ID NO: 2289

SEQ ID NO: 2293 - DNA, 20 bp, Homo sapiens
gtgtagcgccttccatgtct

SEQ ID NO: 2294 - DNA, 20 bp, Homo sapiens
ataagcccatgcctcaacag

SEQ ID NO: 2295 - DNA, 356 bp, Homo sapiens
gtgtagcgccttccatgtctagggtagaccttgtacccgcttaaactgtacaacttgaccttcatggtggcagctccaggggaaaagaaaagatggcaaagggaaggagaggatcatgggaagagccattcttcttatgagaagttttggcaacttttgaaaagtctgtgcttacccttatctatgtacatatgacatctacagactatgaacgcattttgcatcaggacctaaatagcaactatcaggttctgaggcatctgccctctccttcctcctccctggatcttgattcagctgctttaagatggctctagtgacgggcctcttatttttctgttgaggcatgggcttat

SEQ ID NO: 2296 - DNA, 23 bp, Homo sapiens
tggatcattcacaagaaagtcct

SEQ ID NO: 2297 - DNA, 20 bp, Homo sapiens
cttgcctttcttcctctcca

SEQ ID NO: 2298 - DNA, 411 bp, Homo sapiens
tggatcattcacaagaaagtcctgtgaactgtgtaagtgtctgacacaaaaatatgctatcagtactgtactaatggagggctgggtgccatggctcatagtcccagcactatgggaggctgtggtgggtggataacttgaggccaggagtttgagcccagcctggccaacatggtgaaaccccatctctactaaaaatacaaatttagccaggtgtggtggcatgcacctgtaatcccagctacttgagaggctgaggcatgagaattgcttgaatccaggaggcggaagttgcaatgagccgagatggtgccgctgcacttcagcctgggcgacagagcaagactgtctcaaaaccaaaccaaaacaaacaaacaaaaaattgtactagtggagaggaagaaaggcaag

SEQ ID NO: 2299 - DNA, 20 bp, Homo sapiens
agaaaccatcccacattcca

SEQ ID NO: 2300 - DNA, 20 bp, Homo sapiens
ccatggatcttcccaacaag

SEQ ID NO: 2301 - DNA, 258 bp, Homo sapiens
agaaaccatcccacattccatatcctaacatctgctacagtaaaaagatagacagatagaggaagagagacagagacagagggagacagagcgagagagatgaatcaccttcaagggtattgcctgtcatgactttaagagaggcagcattgaaaacggcaagaactctaccctctgtcccagccctgacctattggaaaccaaagcagcaccagggatagtagtgaagggctgggggcttgttgggaagatccatgg

SEQ ID NO: 2302 - DNA, 20 bp, Homo sapiens
ggtcggttctctaggtcgaa

SEQ ID NO: 2303 - DNA, 21 bp, Homo sapiens
catgctatgcccttaatcagc

SEQ ID NO: 2304 - DNA, 144 bp, Homo sapiens
ggtcggttctctaggtcgaagatcattatttatgctgcctctcttaaaggcatgacaggtaatgcccttgaaggtgattcatctctctctctcagtttatctctttgtttactgaaatttaaagctgattaagggcatagcatg

SEQ ID NO: 2305 - DNA, 2001 bp, Homo sapiens
taagcttcttccaatgcctcccatacctcctcacttcatttcacagtctctgttttgtagaacaaggggatgctccaagaggacaaatgtgaaggtctgtggtcacttcaaggctgcaatcccctgggtggtaagaacacatccaccatggtgctctaaagaaaattctgggcacttgttagaatatcatttagggacaattccacccaaaagaatatacatcaggagccatttttccacccactatccttgttccacctccaacattctcttgctgcatttcagaataggaaacaacctcttctctctggcattgcttcaagaaaaggatataaacaaggggcccgacaacgattctggaaattgcttctcctcagaaagcaatatggatatttatcctagaatatggaggtcggcctatactctagcagatggtctgcaacattctttattgtcactaggtttggcttctgtttttgctttttttttttttcagggtttcactatgttgcccgggctggtcttgatctcctggatgcaagtgatcctcctaccttgggctcccaaagtgttgggattacagacatgtaccaccatacccagccctgtttttgccttaattctacttggctatgtggatttttgttttttgaagaatctaaaagtttctgcgtttacacagtgcatctctctaagtgcaaacttctaatttggtgagattcaggcctgggcctttgcaacacatgataccataatttgtgcttttcaagactactcctttctgcaccaggtcatgacagtacatcacactctgtaaccacggtacagttacctgaccctacctgtttatagcaattgcacctttggttccagagttgtagaagtggggaacccatctggattctgattcattctcacagtgcttgtgtgacagacagggcagaaatcatgatcccccattctacaggttggggaaaccaaggcacagagaagcaatcaacccaaagtcactcagtaagccagaaaacaaactaggtaaaggtccaggcaagaccacctatgttcctttcagtgccttatctgaaaaatcagattgtctcctccaatgaatgcacatactttggaagtaagtagttttaaagcggaattttctatggtttcaaaagccctttaccaactcaagaaccacaaggtaagaaccagaatcacattaaccttttagttaaatgcttctgactcatggataataccaattatttcaactcactgacaacctggttatcaacaagaagaaaatttaaggaaaaaattcacccattcaataaaaaaacctcggtaaacagctcctttccttgtttcatgatatcttgagcctaacacccaagcactgcttccttctacagaatacaccttttatatttgttggcatgtgatggagtgggggtgaagggttgacaaagtgtgtgtgtatggatgtgtgtgtaataatcagccatttcagggacaattttacccagcagaatatatatgaaatatgtttaatgtagcagttctctaccctgtttccattttttttttttggtaacattttattcctgatcctggtttaatgtaaaaagtgatgttttacttcccaccttccttgatgaaggcagagtcaatgggtggatatggccgtggggcaatttcagcttaatggaagggaagcactctaagggttaaagttgcctgatgacaactgaatgtgaccttttggaccacagagtgacctggtattgcaagtatttcaccccagaggctaaatgaccatctgtccacgaggcactgccctttccaacactagggagccatattcccagaaagaaactaggctgacagcaatcctcctgcctccccctccaggtcaagaaaggcacaaaaaggaccaacaaataatactgacatggtgctttggatccaggaggccttgcggtaccaggagaggaatactgatggttccat

SEQ ID NO: 2306 - DNA, 20 bp, Homo sapiens
ctgctgtcttcatggagtgg

SEQ ID NO: 2307 - DNA, 20 bp, Homo sapiens
ttctaccaagtggcacagga

SEQ ID NO: 2308 - DNA, 155 bp, Homo sapiens
ctgctgtcttcatggagtgggccccaccctgcaaggaagcttaatggaatggaacactgctcccaaaggaatccagcccctccaggggctgggggtttctattaaagctaaacagcatcaccaaaccaaccaatttcctgtgccacttggtagaa

SEQ ID NO: 2309 - DNA, 20 bp, Homo sapiens
tcctcacgttgcttcaggtt

SEQ ID NO: 2310 - DNA, 18 bp, Homo sapiens
gaggagcgggagaagcag

SEQ ID NO: 2311 - DNA, 260 bp, Homo sapiens
tcctcacgttgcttcaggttctgctcctgctgaagcttgcgcagccgatcctcccgggccgcgcgctccgcccgctcccgccgcaggaggccctggcgttcggccagctcccgccgccgctcctcgctgcgctcgtactgccgctgccgccgccgcgccgcctcgcgctcttcgcggccacggcggcctcgccgctcctccacctgcgcggcccaggctcggcggccctgctctagggcgcgctgcttctcccgctcctc

SEQ ID NO: 2312 - DNA, 20 bp, Homo sapiens
ccactgtaggatgacgacga

SEQ ID NO: 2313 - DNA, 19 bp, Homo sapiens
ggcctgtatgaggcctacg

SEQ ID NO: 2314 - DNA, 377 bp, Homo sapiens
ccactgtaggatgacgacgatgcgcccgactcggagctgagggcgccctcacgccggcgggacagtgagtccagcgaatggctcttcctgcctgttcgagaacccgctggcggaggttgggtccgggcggaggagggactaggggaagccttgcgggccgcacgcggcgcgggcgaggccgggaggctggcgctgctgcagctgctgctgctgcccgcgctcggggccgaggccgcggcggcggcggcggcggcggcggccgcggggctcaaaggcgtgaaaagacgccgcttctcctcgcgcatgatgcgctcgcgctcggcccggcattgctgcagcttggcgcgccgctccgcctcgtaggcctcatacaggcc

SEQ ID NO: 2315 - DNA, 19 bp, Homo sapiens
tcttcctgcctgttcgaga

SEQ ID NO: 2316 - DNA, 18 bp, Homo sapiens
atcatgcgcgaggagaag

SEQ ID NO: 2317 - DNA, 226 bp, Homo sapiens
tcttcctgcctgttcgagaacccgctggcggaggttgggtccgggcggaggagggactaggggaagccttgcgggccgcacgcggcgcgggcgaggccgggaggctggcgctgctgcagctgctgctgctgcccgcgctcggggccgaggccgcggcggcggcggcggcggcggcggccgcggggctcaaaggcgtgaaaagacgccgcttctcctcgcgcatgat

SEQ ID NO: 2318 - DNA, 20 bp, Homo sapiens
cttcgaggacgaaggagaaa

SEQ ID NO: 2319 - DNA, 20 bp, Homo sapiens
cccagttaggctgctgaaag

SEQ ID NO: 2320 - DNA, 172 bp, Homo sapiens
cttcgaggacgaaggagaaatttttgtttaaatgtatatatgtacatatatacacacatataatatgtatatatatacactacacacatacaggtagatgtaggtatagatatggatagatatcgatatataaatcaccaagaaaccctagtctttcagcagcctaactggg

SEQ ID NO: 2321 - DNA, 20 bp, Homo sapiens
agcgaataattgggtggaaa

SEQ ID NO: 2322 - DNA, 20 bp, Homo sapiens
cctgcgtcaaacccataagt

SEQ ID NO: 2323 - DNA, 419 bp, Homo sapiens
agcgaataattgggtggaaatatggcgcctgatgcaaattgtgattttttttttttcaatgaaaaactaaaaacaggctgggcaaggtggcttacacctgtaatcccagcacttcgggaggtcgaggccagtggattacttgagtccaggaatttgagaccagcctggacaacatagcgagtccccatctctaaaaaaattttcaagaattagctggggtggtgtcctgtgcctgtagtcccagctactccagaggctgaagtgggaggatcacctgagcccaggaggttgaggctgcggtgaaccatgactgcaccaccgcactgcagcctgggtgacagagtgagaccctgtctcaaacaaaataaaacaaaataaaaacaaacaaaaactaagaacacttatgggtttgacgcagg

SEQ ID NO: 2324 - DNA, 20 bp, Homo sapiens
cctctggcataagccacttc

SEQ ID NO: 2325 - DNA, 20 bp, Homo sapiens
acatcagtgcgtgtgtgtgc

SEQ ID NO: 2326 - DNA, 156 bp, Homo sapiens
cctctggcataagccacttctctgctcagtcctctggcataagccacttctctgctcagtggcctctcccccgtgcctctgcctgccaacatgcacgcacacacacacacacacacacacacacacacacacacacgcacacacacgcactgatgt

SEQ ID NO: 2327 - DNA, 20 bp, Homo sapiens
gaggctacactggcatcaca

SEQ ID NO: 2328 - DNA, 20 bp, Homo sapiens
cctgggcaatagagcaagac

SEQ ID NO: 2329 - DNA, 209 bp, Homo sapiens
gaggctacactggcatcacagccactgttcccactggcctctcccccgtgcctctgcctgccaacatgcacgcacacacacacacacacacacacacacacacacacacacgcacacacacgcactgatgtatttctttctttttacattttaacttaattttaatttaattttattttttgagacagagtcttgctctattgcccagg

SEQ ID NO: 2330 - DNA, 20 bp, Homo sapiens
atgcctcagaccagtcatcc

SEQ ID NO: 2331 - DNA, 20 bp, Homo sapiens
agctgagcttggtgcatctt

SEQ ID NO: 2332 - DNA, 409 bp, Homo sapiens
atgcctcagaccagtcatcccaatatatatatttagacattcagagatgagtcatattctacttctgggaatatgtgtgatcactggcagaatatgtgtctcttggggatcaggaatttacctttgtatgtgtctcttggggatcaggaatttaccatcaggctccttttaaatttaatttttacttttattttgagatgagttcttgctatgttgcccaggctggcctcaaactcctggaatcaagcaatcctcccaccttagcctcccaagcagctgggataacaggaatgaaccaccatgcccagccatcaggctcctttttacccatccaaatgtgtcaatcaaccacacaacaacaacaagaaatgcatcaaaaagttattgttaagatgcaccaagctcagct

SEQ ID NO: 2333 - DNA, 20 bp, Homo sapiens
cccatccaaatgtgtcaatc

SEQ ID NO: 2334 - DNA, 20 bp, Homo sapiens
aactggcactcagggtaagg

SEQ ID NO: 2335 - DNA, 141 bp, Homo sapiens
cccatccaaatgtgtcaatcaaccacacaacaacaacaagaaatgcatcaaaaagttattgttaagatgcaccaagctcagctaggatatctgcaaatactgagaaggggaagacaaggccccttaccctgagtgccagtt

SEQ ID NO: 2336 - DNA, 20 bp, Homo sapiens
agcccgagtgacagagtgag

SEQ ID NO: 2337 - DNA, 20 bp, Homo sapiens
gcccatctcttgcctgatta

SEQ ID NO: 2338 - DNA, 128 bp, Homo sapiens
agcccgagtgacagagtgagacttcgtctcaaaaaataaataaataaataaaaataaataaataatcacacatgtgctgggaagcagagggactgctgggagaccctctaatcaggcaagagatgggc

SEQ ID NO: 2339 - DNA, 20 bp, Homo sapiens
tcatgacgaatggagtcagg

SEQ ID NO: 2340 - DNA, 20 bp, Homo sapiens
aatcgggcatatgtgtcctc

SEQ ID NO: 2341 - DNA, 131 bp, Homo sapiens
tcatgacgaatggagtcaggctgctttcattttcttttcttgagtaggctgcagagccaggcagtgctggcaacaagaggcaagcccctgtagaccctctgcagatgggatgaggacacatatgcccgatt

SEQ ID NO: 2342 - DNA, 501 bp, Homo sapiens
attagctgctttgccttgttaagaacagacaataatttaactggagattttaaagatgtttgatgcctatcaagaattcatttagcagaggtgagcactggtttacacctaccctcttttagccctagataattagtggaatcaagwttgaaatccagatcagctcatagaggtacaaagactagttaacaatggttgtccctggggaggggaccaattgctggagaataccttcctcatacctcccagagaagatctgactgaaaatgagctgcctcactcaccataaagccctctgttttaaaaatgttcagatgtcagccagataactgtatcctctacagcagcttcttgtaaacatgtgaggtatacggcagtgccgagtggagggaaccatggcagactgcaaacaagcatggttttcctagacactcagactcaaacacagttacagatggtgctgggccaacagccagttaagaccccaagattgcaaagaga

SEQ ID NO: 2343 - DNA, 255 bp, Homo sapiens
attagctgctttgccttgttaagaacagacaataatttaactggagattttaaagatgtttgatgcctatcaagaattcatttagcagaggtgagcactggtttacacctaccctcttttagccctagataattagtggaatcaagwttgaaatccagatcagctcatagaggtacaaagactagttaacaatggttgtccctggggaggggaccaattgctggagaataccttcctcatacctcccagagaaga

SEQ ID NO: 2344 - DNA, 21 bp, Homo sapiens
ggtctgggagtcattggattt

SEQ ID NO: 2345 - DNA, 22 bp, Homo sapiens
tgacaagtgatgacacagatgc

SEQ ID NO: 2346 - DNA, 430 bp, Homo sapiens
ggtctgggagtcattggatttttttttgttgttgttgtttattttttattgttcttctgagacagagtgtcattcttgttgcccaggctgtagggcaatggcacgatctcggctcactgcaacctctgcctccgggttcaggccattctcctgcctcagcctcccaagtagctgggattacaggcacacaccaccgcacctggctaattttgtatttttagtagagatggggtttcaccatgttggccaggctggtcttgaattcctgacctcaggtgatccacccaccctggcctcccaaatagctggggttacaagcgggagccactgcgcccagcctggattgttaattatgtggttttctctgcaaaatttctgtaaccttgtcaaattacttcttgtttttgagcatctgtgtcatcacttgtca

SEQ ID NO: 2347 - DNA, 20 bp, Homo sapiens
aaatgaaagcaatggctagg

SEQ ID NO: 2348 - DNA, 20 bp, Homo sapiens
agcccagaggtagcaaagtg

SEQ ID NO: 2349 - DNA, 420 bp, Homo sapiens
aaatgaaagcaatggctaggcacggtggctcacgcctgtaatcccagcattttgggaggccaaggcaggtggatcacctgagatcaggagttcaagaccagtctggccaacatggcgaaaccctgtctctactaaaaatacaaaaattagctgggtgttgtggcgagcgcctgtaatcacagctacttgggaggctgaggcagaagaatcgcttgaacccgggaggcagaggttgcagtgagccgcgatcgtgccactgcactccagcctgggcgaaagagcaagactccatctctaataataataataataataataataataatataataataataataaatgaaagcaaaccacaaagtagatcaaacccctctgccgggggctggagcctgagagacactttgctacctctgggct

SEQ ID NO: 2350 - DNA, 20 bp, Homo sapiens
caaagcaatcctcagcacag

SEQ ID NO: 2351 - DNA, 20 bp, Homo sapiens
aggcacacaggatggttcta

SEQ ID NO: 2352 - DNA, 419 bp, Homo sapiens
caaagcaatcctcagcacagactgctttgtgagcgaatgaatgaatgaatcaatgaatagcactgctacttggtgtaagtactgttcatccagtaggtttaaagccatggttctttatgggcagtgtcaaccctagaggctgtttggacatctgtgggagtgtttttggttgttatgacgatgaaggcaccattggcatttagtgggtagggcccaggatgatacaaataatatcaagcacttattttgtgctcgtgtgtgccaactgctgttttgagcacttcattgaagtgaattcatttcattttcacaacagccttatgaagcaggtactgctgtcactcccatttcacagacaagggggcatagtcagtctgcaatagatagccctacacagcatagaaccatcctgtgtgcct

SEQ ID NO: 2353 - DNA, 20 bp, Homo sapiens
gggagggaatacagtgtcca

SEQ ID NO: 2354 - DNA, 20 bp, Homo sapiens
gacaatctgcagggaggaag

SEQ ID NO: 2355 - DNA, 181 bp, Homo sapiens
gggagggaatacagtgtccaatgaccaggagctgtgtgtgtgtgtaggtgtgtgtgtgtgtatatgtgtgtgtgtgtgtgtgtgtgtgtgtatgtgggaggggtttgtgggctggctctgtctagaaaggcctcaggccctaggctatccccagtcccttccttcctccctgcagattgtc

SEQ ID NO: 2356 - DNA, 20 bp, Homo sapiens
gggagggaatacagtgtcca

SEQ ID NO: 2357 - DNA, 20 bp, Homo sapiens
gacaatctgcagggaggaag

SEQ ID NO: 2358 - DNA, 181 bp, Homo sapiens; identical to SEQ ID NO: 2355

SEQ ID NO: 2359 - DNA, 20 bp, Homo sapiens
aggctggtgagctgacattt

SEQ ID NO: 2360 - DNA, 20 bp, Homo sapiens
cccatgctgtttcctcaatc

SEQ ID NO: 2361 - DNA, 383 bp, Homo sapiens
aggctggtgagctgacatttataaagggaggagacttgaccctgattctggcaattcaaagcagaaggaaatggaagctaatcccagctgtaacccagctactcgggagactgaggcaggagaatcccctgaacccgggaggcggaggttgcagtgagctcagatcatgccactgcactccagcctgggcgacagagcaagactccgtcaaaataaataaataaataattaaatatttaaaatgtttaaaaattttaatttaatacttttctgtggcactttggggctcaaccaaagtgccacagaaaagtagaagcagcagccttgggaagattctgaagggtaagtagagaaggccttcaagattgaggaaacagcatggg

SEQ ID NO: 2362 - DNA, 19 bp, Homo sapiens
gcggtacagctgggtcagt

SEQ ID NO: 2363 - DNA, 18 bp, Homo sapiens
accgcgggtcaccaagtt

SEQ ID NO: 2364 - DNA, 1795 bp, Homo sapiens
tcccaagtccgaccccactgaatcacaatggctggaggtcattcggggccccgaatctgcattttcacccccacccaccccccgggcagctttaatgttggcaggctaggaaccacagttcggattactgcttaacagggagataataacctgcttcagacgagctaggtcagacgagcaattcaagagctaacaaggcaacatgcgccaaaagccttgtaaacctcagggcagtacaattctttgcaaataatagtaattcaatcatgcaaataataataatagtaaacgaactggagagcgcactggaaacgccgcatagtccagctgagtcggtgccaccgccccatccactccagcgcagagggactgtctctttaaggcccccccacctccccaaccgcgtcgcttctcccttgggtacctggcccggccggcggcgcgtgcgtgcagggcctcccggcggggcggtcgcggcggcgcgacgccggcgccgttgcgtgcgcgcctggccctgcccctttcccgccccttccccgccccctcccctccgcggggcctcccccgcccgcgcggtacagctgggtcagtgacgcgggcgctgcagccgtcgctaccgccgcgttctattctccgaagccggcgaccgccccacctcctccctccctcccgcccgcttcctctgcccacagcgccggccagagcgagctagacaagggcacgcggggcctcgcctagacccgagaagactgcgggcgcgcgcaagcggcggcgtggaagctgtgagcgcccccatcccggaggtctccgccggctcccgggtgagttgtcaccgcggcccgggggcggcggggccggcattgtgccatcgacgcgctcggccggctgtcaggggcgcgggaccagcgcgcaccgcccaggagtgacgctggccggagcccgggccggcttcggcggctccccgcgcttctctgcgccggcccgctgtcacccggccgcgagccgcgccgctgggagccccgcgctggcgtggcgcggccagccggccagcagtgggggtgcgcggccggggggaccggcggctggtttgcggccgggaacttggtgacccgcggtccggggcgcgccgtcccgcgtcgctgcccgggcagcaccggaagagccagacgccgtgccgatgggtgcagaggaggtaggcagaggccctctgtgccactgtcattactgccctcagcccagcaaagctgcggggcttgcgctggggcagggctggcttagagaaggtggatttcctgaggaaatctcagagcccgcctgtgcgcaccgcggcattcgggagcccccgcgcctcggctgctctttaatctcaaaaacttctcttattaaccaggctaaactccccgaaaccagctattttctttcaaaaagtaggcacgtacatacagactttccttttttcgcttggttttgagaccccagctatgagtgtggatctgactctccctcatgggagtcgtggctggggagctgctgaagtggagaaaagttaccctggacgaatttaggagcaggagggggaggtggttatggggacagcaagacccaggagcaaagaggcgtcaaaataaagtcttgggctggttaaagggaagttggcgtctgggcaaggaggcctaaagctgttgttcccacagaattttctttcagtggcaggcgacatgctgggctttgttgctctcgctaactgggctcctgtgtgctcttccagaggtgcagtaagattactcagttcaat

SEQ ID NO: 2365 - DNA, 19 bp, Homo sapiens
actggaaacgccgcatagt

SEQ ID NO: 2366 - DNA, 20 bp, Homo sapiens
ccttgtctagctcgctctgg

SEQ ID NO: 2367 - DNA, 414 bp, Homo sapiens
actggaaacgccgcatagtccagctgagtcggtgccaccgccccatccactccagcgcagagggactgtctctttaaggaccccccacctccccaaccgcgtcgcttctcccttgggtacctggcccggccggcggcgcgtgcgtgcagggcctcccggcggggcggtcgcggcggcgcgacgccggcgccgttgcgtgcgcgcctggccctgcccctttcccgccccttccccgccccctcccctccgcggggcctcccccgcccgcgcggtacagctgggtcagtgacgcgggcgctgcagccgtcgctaccgccgcgttctattctccgaagccggcgaccgccccacctcctccctccctcccgcccgcttcctctgcccacagcgccggccagagcgagctagacaagg

SEQ ID NO: 2368 - DNA, 20 bp, Homo sapiens
agggctggcttagagaaggt

SEQ ID NO: 2369 - DNA, 20 bp, Homo sapiens
ctcccatgagggagagtcag

SEQ ID NO: 2370 - DNA, 121 bp, Homo sapiens
  misc_feature 61: n = A,T,C or G
ccccgaaaccagctattttctttcaaaaagtaggcacgtacatacagactttccttttttncgcttggttttgagaccccagctatgagtgtggatctgactctccctcatgggagtcgtg

SEQ ID NO: 2371 - DNA, 2001 bp, Homo sapiens
cttcacccacagaaatttaagattagagtgtggaattgccctttatgtaaactgtccttgctgaaattttctttgactagactaggcttcagcttctgacaaagacagtaaaatgaaactggcttctgggaatggcataagagcctgtttatccaattcttcctttagattgttctcagttgagctcagcaaactaagtggacggaggcttgtaaaaggtaactgcaaaaagggtacaaggtgattttgcttaatttgcattttaaattatagcagtctatgcaaactgtttgaaggaagactgagagatgttttttggtggggaggcacaagattacagatagcttggaaaataaaagggaaaaaaaatcagcatgattctaccaccctaacataatgtgtattctgttttttccatcttcagatggtagtacctgtacattcagctttgtatttttttcacttagcttttttttttaacaggtcataaaattcacccatttaaagtacaattcagtggtttttagtatatttacagagttgtacatctatcaccataatctaattttgcaacattttcatcaccccaaaaagtcactccctatttctctacaatcccacctagccctaggcaaccactcatctttctctctatataggtttgcctatttggacatttcatatagatggaatcatatgatatgtggtctttaataactggcttctttcacttagcataatgtttttgaggcttattcatgttttaccatgtatcagtacttcattccattttattgctgaatgctattctgttgtattgatataccacattttgtttatccattcatcagctgatggacagttgggttgtttctgttttttggttatgaataatattgcagtattgctaagaacgtgtgtataagtttttctgtgggtatatgttttcatttctcaaggagatacctttaaagctgcatccatccatatctctactttgcggttaacattctcctaggttatgcagtttgtttgaggaagaacagtgttttagtaaactcttgatcctactgtggtgttgcggatattgccctgaatcaagaaaaggtgccaccaaaaaaaaatccaaaacccaaaaacaaaaagagagaatcctgtttttaagtttgaactctccagtagcattgtttccaaatatttggtgcagaactttaaccattggtgagagttgacagacgcgatagtgcctaaattcaatgcacatgtactgctgctttaaacaaataaagaggattttcaatgcgaagcctcagctctaaatctcatctttgtgttttatagagaggactttaccatgaacccccaaagccttccttatcaaatgtgatttatagttctcagaagcttttccttttcttgtgaaaaattccatgccagggttctgtgcacctgctcaaaggcttctgctaggttggggagtggaatgcttattgaacagagagccagccagcaaggtagggaggagggagagggtctgtgagtgccctgaaaatgtagatctgagaaagagtgctctttagagcagcccccacagggcttttccaggtggacctcaggtgtaacccgaggttaaaaacagatcatgccagacacaaaaaggagcagatggtgctgcttggagtgtcatttcctctacaggatgtgtccctgtgtggttttacatcatgccaaccatattaatgaaataatgcaacagaatgtctccttttgcccttgttccaattggaaccacaggttgagtttccctaacctgaaatatgaagtgctccaaaatcttaaactttttgagcacccacatgatggagaattccacacctgacctcatgttttaggtcacagtcaaaactaccttcagtctatgtgtattacgtgtaaatgaaacataaatggattttatgtttagaccagggtcccatccctgagatacctgattatgtatat

SEQ ID NO: 2372 - DNA, 20 bp, Homo sapiens
atatgccctttgtccagcaa

SEQ ID NO: 2373 - DNA, 20 bp, Homo sapiens
atggctgcattcacacacat

SEQ ID NO: 2374 - DNA, 149 bp, Homo sapiens
atatgccctttgtccagcaagacagacaaaaactaggaacttgaattctcttctctggattcctgtatctggagccaaggccaaggatcagttcttctagaaagttccctcctgtgtgtgtgtgtgtaaatgtgtgtgaatgcagccat

SEQ ID NO: 2375 - DNA, 405 bp, Homo sapiens
atgcagccataacttccctgccaaaattcattgccaaaaattttgtgatttgaagcaggccttacctgttaatgcaaatttgattctcaaatcctaagagtttccaaaggttgagtgaagtgagatgagactcttagttgaagatccagatgcttcactgttgctatctagatgctaccaaaactcccagcacaacaaagtatatgaagagaggytctaggttcatgaaatgttagagttggaaaaatgggcctttggggttcttcttattctacctcctcattttaaagaaatgcaagtgggaaatggatgctcagagctgacttgcctgagaggtgaaagggctagtggagaagccagagcccctgattcctagtctagtgcttttccctcccggtgtgatca

SEQ ID NO: 2376 - DNA, 255 bp, Homo sapiens
atgcagccataacttccctgccaaaattcattgccaaaaattttgtgatttgaagcaggccttacctgttaatgcaaatttgattctcaaatcctaagagtttccaaaggttgagtgaagtgagatgagactcttagttgaagatccagatgcttcactgttgctatctagatgctaccaaaactcccagcacaacaaagtatatgaagagaggytctaggttcatgaaatgttagagttggaaaaatgggcctt

SEQ ID NO: 2377 - DNA, 20 bp, Homo sapiens
taagccaaggaggaaggaca

SEQ ID NO: 2378 - DNA, 20 bp, Homo sapiens
tccatgatcagcatgtacgc

SEQ ID NO: 2379 - DNA, 121 bp, Homo sapiens
  misc_feature 61: n = A,T,C or G
ggcagcgtgcttcatgtttggactcttgaagaacacacatggaaaaaaaaaaagaaaaaancctcttcccctctcaacccttttctaagtttttattaagaatatattaatttgagcatta

SEQ ID NO: 2380 - DNA, 22 bp, Homo sapiens
aatgatgcctcctagtccatag

SEQ ID NO: 2381 - DNA, 21 bp, Homo sapiens
ctccagaaacatgaaacctca

SEQ ID NO: 2382 - DNA, 376 bp, Homo sapiens
aatgatgcctcctagtccatagtatatctaggataattttaacatttaaaatgaattatgttatataaaatggaataaatttcaactctaccaagattgcatgcttttgggtcagactgtttagtttgatatcttggtctcatcactttctatctgtgtaagcttggataggttatttagcccttctgcttctgttttttgttttgttttgttttgcctaaaacggatataacagtacctaccttttaaggttgttgcaaggattaaataagatattagatgtaaaatgcttacatctgtgcgcagtgactaagcactcaaatgccagttaataataataattctgtgattatcctgaggtttcatgtttctggag

SEQ ID NO: 2383 - DNA, 21 bp, Homo sapiens
cacagaatcctgagcctttga

SEQ ID NO: 2384 - DNA, 20 bp, Homo sapiens
acactccacagctgcttcct

SEQ ID NO: 2385 - DNA, 379 bp, Homo sapiens
cacagaatcctgagcctttgaaaaatgctgttgcttttgaaaagtaataaatatagaagccaggccacctttttcagatttataccctcttcccattctattctcagctagtaaatactatggcctcagtttgcctaaaaagataatggcttaagtttatttaaatgtcagcagtagtttggtaatgaattaagtcctttgatgatgatgatgacgacgatgaagatgatgataatgttgatgatgatggaggacactcagtagcagtggactgagttgtggactagttctttctaaggctcccaggaagaaaattgctaactcacttaatatgtgaaggccttagtgtcaggtagaggaggaagcagctgtggagtgt

SEQ ID NO: 2386 - DNA, 20 bp, Homo sapiens
cttgcctttcaggaggacat

SEQ ID NO: 2387 - DNA, 21 bp, Homo sapiens
gggttataatgggaaccctgt

SEQ ID NO: 2388 - DNA, 214 bp, Homo sapiens
cttgcctttcaggaggacatattctaaagagttgttttttgggtggaagagaaggaagtcatctcctctgcccccactccacccaaggcacaccacacacacacacacacacacacacacacacacacacacacacacacattttcacctccacccagaggttccttgtggcagatgtgaaggagtttagaacacagggttcccattataaccc

SEQ ID NO: 2389 - DNA, 20 bp, Homo sapiens
tttgggtggaagagaaggaa

SEQ ID NO: 2390 - DNA, 20 bp, Homo sapiens
aagccacgtttggtctcgta

SEQ ID NO: 2391 - DNA, 205 bp, Homo sapiens
tttgggtggaagagaaggaagtcatctcctctgcccccactccacccaaggcacaccacacacacacacacacacacacacacacacacacacacacacacacattttcacctccacccagaggttccttgtggcagatgtgaaggagtttagaacacagggttcccattataacccctttgttgtacgagaccaaacgtggctt

SEQ ID NO: 2392 - DNA, 20 bp, Homo sapiens
tgcttcaaaccttgcctctt

SEQ ID NO: 2393 - DNA, 20 bp, Homo sapiens
cttccagtccctgctttgtc

SEQ ID NO: 2394 - DNA, 251 bp, Homo sapiens
tgcttcaaaccttgcctctttctggccttgtaaggacctaagaaagacgcaaaaaggaagtaatctacccccatcactcttggtgtgagtttgaaggttctgaactggggtggggtggggagtgtgtgtgtgtgtgtgtgtgtgtgtgtgtgtgtgtaattgtgtgtgtgtgggattgaaggatgagggttgtggacagtcttaaaagccacctttaccaaatgaagaggtgacaaagcagggactggaag

SEQ ID NO: 2395 - DNA, 20 bp, Homo sapiens
tgcttcaaaccttgcctctt

SEQ ID NO: 2396 - DNA, 20 bp, Homo sapiens
cttccagtccctgctttgtc

SEQ ID NO: 2397 - DNA, 251 bp, Homo sapiens; identical to SEQ ID NO: 2394

SEQ ID NO: 2398 - DNA, 25 bp, Homo sapiens
tccttaagagaattcttccattctg

SEQ ID NO: 2399 - DNA, 21 bp, Homo sapiens
tgtgtctcactgccctctaca

SEQ ID NO: 2400 - DNA, 410 bp, Homo sapiens
tccttaagagaattcttccattctgaaaaaaatttatatatatatacacacacacatataatatataatatatatatttggagacaagatcttactctgttgcccaggttggagtgcagtagcacaatcatagcttactgtaacctcgaactccttggctcaagtgatttctcctgtctcagtctcccgagtagccaggactacaggtgcacaccaccacacctggctgattttctttttattttttgtagagacagggtctcactctgttgcccaggtggtttcaaactcctcaccttgagtgatccttctgcctcagcctcccaaagcactgggattacaggcatgagccactgcacctggtgtgaaaaataaattttatctgaatttgtagagggcagtgagacaca

SEQ ID NO: 2401 - DNA, 20 bp, Homo sapiens
gccttcaccactccgataaa

SEQ ID NO: 2402 - DNA, 20 bp, Homo sapiens
ggagtgatgtagccctggag

SEQ ID NO: 2403 - DNA, 370 bp, Homo sapiens
gccttcaccactccgataaaactgttcttgattaggtcaccagtgatttcctagtggccagatccagtgggcctttttcagtcttcgtctttctgggcctttgctgtatctgccacttctcatgttttccttgagtctctctgtctctctcttgacatctgtgttgcacatgcccctggtttccatgtaccttttggagtatctctcataggctttccttcctcagtatgcccattataagttagcattctccctaggattctgtccttaactttcttctcaacctgtcctctttcctaggtgagctcatctattttgcatggtttcaactgtcacttacaggttgatcactccagggctacatcactcc

SEQ ID NO: 2404 - DNA, 21 bp, Homo sapiens
tcttgccttctctcttgcatc

SEQ ID NO: 2405 - DNA, 22 bp, Homo sapiens
ccatcagcacatttgtatggac

SEQ ID NO: 2406 - DNA, 169 bp, Homo sapiens
tcttgccttctctcttgcatcttttctccctttctccctgggcccctgtatctctgcagtgtgcagaggctgggttttgttgttgttgttgttgttgttaagatgtgttattttttgaaagcattttaggaacactgtgtacggatagtccatacaaatgtgctgatgg

SEQ ID NO: 2407 - DNA, 20 bp, Homo sapiens
ttgcaccttcagcaggacta

SEQ ID NO: 2408 - DNA, 20 bp, Homo sapiens
ttaaaggtgccctggagtca

SEQ ID NO: 2409 - DNA, 163 bp, Homo sapiens
ttgcaccttcagcaggactatggcattctcagcaggggtgggccccaggcacgtggactgaggagatctgggccctggctgtttcctggctggccctagctgctgctgctgttgcctcccaaggccagagccatttttgaaggtgactccagggcacctttaa

SEQ ID NO: 2410 - DNA, 20 bp, Homo sapiens
gaggccctctcctctgtctc

SEQ ID NO: 2411 - DNA, 20 bp, Homo sapiens
tggagaaagggccacagtat

SEQ ID NO: 2412 - DNA, 997 bp, Homo sapiens
  misc_feature 498: n = A,T,C or G
accaggtgttggggcagcagcactagttcccaagaaataaaatcagaacggtgactctccttacctgtgttttgaagaggaaagccggctattggggtaagagatggattacagcaagagaagggtagaagcggtgaagaattctgtggccttagagcctttttcagatgtggaaacagaaggcagagagccttcatgaccagctccctggctggtggcggaggtgggactgagtcattgaggccctctcctctgtctcagctctaagttcagatgtgatattccttgtgaggatggccgagtgctagttttgaacttgatgcttagttctaggttcctcttcagtgataattttttttaattaggaggagtagtcactaacatgccaaaggaatactgaagtgaaatggattctttttgtttaaacaaagttttagcctcagtatttctctagggataatgaatacctagtgaaacttttttttttttttttttttngcttggtgtactaaagccacaatccaaggacaagtcttgtttttttaaattctatattcaaggcagattatttcttaaaatgattagatttatactgtggccctttctccacagtagctgggttctcccattctgggcaatactttggagatttaggggttagctttcctctgttttatttctgaagcagtaacccttggcctagccttacatataaacaccccactgactaccttctatttatcttttctttgcaaagccctcatttccatcaccccgtctgttctgcacctgtcccgtcttaggcttcaggatggaattggttcctcgactcaggtagctgcttaagcagtaagggaggagccagctattcctgcaaagcaaaaccaaaaacaaacaaaaaacctaaaactgatcaggaactcatacatgtacatcttgtctgctccatttccataccggctcctccccacagtattcatgattttggcagaccttt

SEQ ID NO: 2413 - DNA, 20 bp, Homo sapiens
cctgaaggcgaccattagtt

SEQ ID NO: 2414 - DNA, 24 bp, Homo sapiens
tcacctggaataaagcataagaaa

SEQ ID NO: 2415 - DNA, 382 bp, Homo sapiens
cctgaaggcgaccattagttaccaatttcttttttttttttttttttggtgtgtgtgtgtgtgtgtgtgtgaaacagagtctcattctgtcacccaggctggagtgcagtggcacaatatcggctcaccacaacctccgcctcctgggttcaagcgattctcctgcctcagcctcctgagtagctgggattacaggtgcccgccaccacacctggctaatttttgtatatctagtagagacggggtttcaccgttttggccaggctggccttgaactcctcaccttgtgatccacccgcctcggcctcccaaagtgctgggattataggcatgagccactgtgcccggcagttaccaatttcttatgctttattccaggtga

SEQ ID NO: 2416 - DNA, 20 bp, Homo sapiens
caggtgagtttttccgtgct

SEQ ID NO: 2417 - DNA, 20 bp, Homo sapiens
gggcaattcaacctgtgcta

SEQ ID NO: 2418 - DNA, 133 bp, Homo sapiens
caggtgagtttttccgtgcttataggggtgtgtgtgtgtgtctgtctttcaaaaatacatgcatatacccaggttatttttttcacatactaattttagaagtcattccatattagcacaggttgaattgccc

SEQ ID NO: 2419 - DNA, 20 bp, Homo sapiens
agcctctgccaggagtaatg

SEQ ID NO: 2420 - DNA, 20 bp, Homo sapiens
ccctcaaggcaataaccagt

SEQ ID NO: 2421 - DNA, 386 bp, Homo sapiens
agcctctgccaggagtaatgtgctcccatagtactctgatccacttgtatttggtgcttccttttttttttcttttccttccttcctcctttcctttcccttcctcttcctcttcctccattcttccctccctccgtcttcctccattcttccctccctccctattcctccattcttccctccctccctccctctcacatcctttaggactcagcatcacctcctctaggcagtctttcctgactaccaccacttatgcacaaaacacctaagcactaccttatgtggcctcatttattcactgcttaaatattttttatacacgtgctgtgatgtggcacatgcaggtgtcattcttgatgatccactggttattgccttgaggg

SEQ ID NO: 2422 - DNA, 20 bp, Homo sapiens
agcctctgccaggagtaatg

SEQ ID NO: 2423 - DNA, 20 bp, Homo sapiens
ccctcaaggcaataaccagt

SEQ ID NO: 2424 - DNA, 386 bp, Homo sapiens; identical to SEQ ID NO: 2421

SEQ ID NO: 2425 - DNA, 21 bp, Homo sapiens
gggcatcctttattagggtta

SEQ ID NO: 2426 - DNA, 20 bp, Homo sapiens
ggaggtaaatgggttgacga

SEQ ID NO: 2427 - DNA, 230 bp, Homo sapiens
gggcatcctttattagggttatagatggcagactccctaatctatgcatataaagccttattaatggagaagggggtgtgtgtgtgtaacttaaaaaaaagaagtgtaatattatatggaatacctgttgtaaactaaaataactggcaaatgaaattaaataagttaactgaaatataataggcccacaccataatgtattgtaatgtatcgtcaacccatttacctcc

SEQ ID NO: 2428 - DNA, 22 bp, Homo sapiens
tggcagactccctaatctatgc

SEQ ID NO: 2429 - DNA, 19 bp, Homo sapiens
atggagaatgggctgcaat

SEQ ID NO: 2430 - DNA, 369 bp, Homo sapiens
tggcagactccctaatctatgcatataaagccttattaatggagaagggggtgtgtgtgtgtaacttaaaaaaaagaagtgtaatattatatggaatacctgttgtaaactaaaataactggcaaatgaaattaaataagttaactgaaatataataggcccacaccataatgtattgtaatgtatcgtcaacccatttacctccctaaaggcttatagaaaagaatctttaaagtcttgagctctgatacacacactctttctcactctctctctgtctctctactggttcctatttttctgaagtctttgtctgaactagagtgggtgggtggtagggctagttagcaattgcagcccattctccat

SEQ ID NO: 2431 - DNA, 22 bp, Homo sapiens
tgaaaagccacttctgtgcttg

SEQ ID NO: 2432 - DNA, 22 bp, Homo sapiens
atttaccacaaaagccctccac

SEQ ID NO: 2433 - DNA, 1787 bp, Homo sapiens
caccataatgtattgtaatgtatcgtcaacccatttacctccctaaaggcttatagaaaagaatctttaaagtcttgagctctgatacacacactctttctcactctctctctgtctctctactggttcctatttttctgaagtctttgtctgaactagagtgggtgggtggtagggctagttagcaattgcagcccattctccatgcctccccccgtctcatctttttcagggacagccaacataatgtggtcacaggtgtgttgggtgagccttgattaatgagattcacggctgtcgagtcaggtcctccggctcatcagcctttggcagtttagcaagcaggctggggccctcagctcccactgctgcattccttctctaggcggtgtattctctctttacgacacgtgttctctctctttttttccttttggttagttgaacttgttctgagtccaagtggcaaaggcaaagcctgacttgggtgtagcagctctgtgtcaatagccgtctctctgctggagcctccaggcaggcggtggggcagagctgggcagtttctgaaagccctgctgtgcctgactgccatccaggtgagacagagctcacctcctggcttctgcacgctgcaggccttgtttccccagggaggagttgaaaagccacttctgtgcttgcctctcctggcagcagggattcgaatagttgctagaattctctcaactttgtgtgtgattatggcttccttaccaaagtggctgcttttaactaacttatggctgaagttttcactttatgtccttgtttgtttgttacaggtgaatcagctcccggccgactttaggattcttctggattttaaattttttctttttaaaaaaacttggacggataaaagatgtgccatggcaggatagcaccaaagagcacctcagtgtttgccgtggcctccgtgggacatggagtgttccttccgctagtgatcctttgcaccctgcttggagacggacttgcttccggtaagtcctgacctgccttctgtgtgtgggtgggaaaatatttaataccattgtttctctcgaagactaggacaggggactctcctcctggcaggcggtttcagggagagcagagggtggagggcttttgtggtaaatatagcagggagccagtccttctgaggtctaatgagtcacctggaggaggggcgtgtgggagcctgctggtggtaaccttgtcacccctctcccccagccataatcatcatcaggaggacagaggtgtaaggttcagagcacaatatgcaggttaaggggacagactttggaatcagactgcctgtgttcagtgcccattctcactacttgcctgccctgtgactctgaacaagttattttactgctgcaaggctctgtttcctcagctgcagaatgggataataataatacctacctcactgggtggttgtgaagattgaggtaataaaataagtatgtaatgattgttagctgtcttttgtttgttcgtctttctgcgctttttctcagaatgagtgggtagttgaagtattgtaatttagtgaaaataagacccggtcactgacactacaaatgttgtgatcttgggcaagcgacttaaccattctagggctcagtttttccctccatcagatgaatgggtttacctggaataacatttaaagtcacttctttgcccctcagtaaatgctttgatgattctaaggactttgtggttgaagatggtgagctggacgggccctagca

SEQ ID NO: 2434 - DNA, 22 bp, Homo sapiens
tcaacccatttacctccctaaa

SEQ ID NO: 2435 - DNA, 20 bp, Homo sapiens
aatcaaggctcacccaacac

SEQ ID NO: 2436 - DNA, 255 bp, Homo sapiens
tcaacccatttacctccctaaaggcttatagaaaagaatctttaaagtcttgagctctgatacacacactctttctcactctctctctgtctctctactggttcctatttttctgaagtctttgtctgaactagagtgggtgggtggtagggctagttagcaattgcagcccattctccatgcctccccccgtctcatctttttcagggacagccaacataatgtggtcacaggtgtgttgggtgagccttgatt

SEQ ID NO: 2437 - DNA, 20 bp, Homo sapiens
tccttaccaaagtggctgct

SEQ ID NO: 2438 - DNA, 20 bp, Homo sapiens
gaagcaagtccgtctccaag

SEQ ID NO: 2439 - DNA, 274 bp, Homo sapiens
tccttaccaaagtggctgcttttaactaacttatggctgaagttttcactttatgtccttgtttgtttgttacaggtgaatcagctcccggccgactttaggattcttctggattttaaattttttctttttaaaaaaacttggacggataaaagatgtgccatggcaggatagcaccaaagagcacctcagtgtttgccgtggcctccgtgggacatggagtgttccttccgctagtgatcctttgcaccctgcttggagacggacttgcttc

SEQ ID NO: 2440 - DNA, 20 bp, Homo sapiens
tcatcaggaggacagaggtg

SEQ ID NO: 2441 - DNA, 20 bp, Homo sapiens
cgcagaaagacgaacaaaca

SEQ ID NO: 2442 - DNA, 273 bp, Homo sapiens
tcatcaggaggacagaggtgtaaggttcagagcacaatatgcaggttaaggggacagactttggaatcagactgcctgtgttcagtgcccattctcactacttgcctgccctgtgactctgaacaagttattttactgctgcaaggctctgtttcctcagctgcagaatgggataataataatacctacctcactgggtggttgtgaagattgaggtaataaaataagtatgtaatgattgttagctgtcttttgtttgttcgtctttctgcg

SEQ ID NO: 2443 - DNA, 20 bp, Homo sapiens
tggttgaagatggtgagctg

SEQ ID NO: 2444 - DNA, 20 bp, Homo sapiens
ggcaacaagggctgtacaaa

SEQ ID NO: 2445 - DNA, 410 bp, Homo sapiens
tggttgaagatggtgagctggacgggccctagcaggggctagacatgccccattgagcctttttgtttgtttgtttgtttgtttgtttgttttcagagagtctcaccctgttgtccaggctggagtgcagtggcacgatcgtggctcactgcaacctctgcctcccgggttccagcgattctcctgcttcagcctcccgagtagctgggactacaggctcatgccaccacacctagctaatttttttattatttagttgagacggggtttcaccatgttggccaggctggtcttgaattcctgacctcaggtgatccacccaccttggcctcccaaaatgttgggattacaggcgtcagccacgtgctcggcccattgaacctttttgagtttgtacagcccttgttgcc

SEQ ID NO: 2446 - DNA, 20 bp, Homo sapiens
ccaccacccacttatccaac

SEQ ID NO: 2447 - DNA, 20 bp, Homo sapiens
gtggaaggaaaggcacatct

SEQ ID NO: 2448 - DNA, 157 bp, Homo sapiens
ccaccacccacttatccaacataaacagataatggcacagtctcagctaatcttttttttcttttcttttctgaattgttggaagaaacaattacagatttttttgttcattgtagccttctccactaccaacatatagatgtgcctttccttccac

SEQ ID NO: 2449 - DNA, 20 bp, Homo sapiens
ccagaacaaatggtgctcaa

SEQ ID NO: 2450 - DNA, 20 bp, Homo sapiens
ttcggatcttgagtgggaag

SEQ ID NO: 2451 - DNA, 375 bp, Homo sapiens
ccagaacaaatggtgctcaataagtatgcatgtgaatggaatgactgtcagagcaggaaggaaggaaggcctagtcaaaaccagcttgggcttcagagaactgtgcacttgctgcccagaatctcacagctaatggtagggccaggacctagcctggtgcctggcataccactgtgacctgcctcttccaaggctcctctaaggaaactgccctggcgtgtggtgttagtggcataatgtctgccttaagcctctctagtgtcattaagctatcctatttacccctaacctcccttttgttggcttcatccctcccattccccacctcattttccaactacccacaccttcccagcttcccactcaagatccgaa

SEQ ID NO: 2452 - DNA, 573 bp, Homo sapiens
tgatctgatcccagtccaggcagccaggcacaccagcacaggccacctggaagggctcctcacaccctctgcaggctcccactcccaagtgatgcactgcactcttccagtgggtaagaagtggtgagacgtgttcatctggaaacctacctagaatcattgaagactgagtgttaaccctaatttttgttttattagcatcctgtgcctctcttttgcagaaagtcgggtaggtaagaagaataacctctaagctggcaagttagcagggtagtggggcaccattgctcagcagatggaatctgtgtttaatgaggactttaacccaatagggacccagttacgtggactctgggtttcttttattagaaagttacagtgcgagggtggtaccatgtgttgtcaatgttttaaacatggcacaacaattagtgtgcagagggtaatttctcaatgccttttcatgacactagggttcatcgagaactataatgacccatccagcctcctaccataatctctaagttttttttatagtcacaggtaattacaccatggagagattacatcact

SEQ ID NO: 2453 - DNA, 20 bp, Homo sapiens
ggagggaggagaggaagaga

SEQ ID NO: 2454 - DNA, 21 bp, Homo sapiens
tggtgtgctcaacctaaatcc

SEQ ID NO: 2455 - DNA, 257 bp, Homo sapiens
ggagggaggagaggaagagagtatggtgtctgctctgctcatctcagcacttcctttcctgggaacttcccatgtcactgttgaaactttggatgtccaatatactgtattccctaaactaatttgtttcttgccctgtgaatgaagaagtgttctctttcactctggtggagtatgttcagtagctgtagtttcaaaaaagaaaaataaagtctaaccttagcctaagaattcagggatttaggttgagcacacca

SEQ ID NO: 2456 - DNA, 20 bp, Homo sapiens
cctgtcctggctgaattgtc

SEQ ID NO: 2457 - DNA, 20 bp, Homo sapiens
tgtcagacatgcctcctacg

SEQ ID NO: 2458 - DNA, 384 bp, Homo sapiens
cctgtcctggctgaattgtcagaattgtggaggaggaggaggaagaagagaaacaagctctcttggagtatcctaaggatcaaagagttaaagaaaaaacaaactctagctaatgaatcaagaagttgaatgagtctaaacaggaaaggaaagagggttggaaggaggatgttaattttaggtacaatttgtgggagaggattggggatgagaagaatagcagtgggcacctatttgcctatgggacaggaagtgatgggctaggtgaggctgcccttctggtccgagggaagaggtcactcaggacaggccacaggagtgcatgcttcttgactctcatcacctggcctcagttcagccaactcgtaggaggcatgtctgaca

SEQ ID NO: 2459 - DNA, 20 bp, Homo sapiens
cctgtcctggctgaattgtc

SEQ ID NO: 2460 - DNA, 20 bp, Homo sapiens
catcctccttccaaccctct

SEQ ID NO: 2461 - DNA, 171 bp, Homo sapiens
cctgtcctggctgaattgtcagaattgtggaggaggaggaggaagaagagaaacaagctctcttggagtatcctaaggatcaaagagttaaagaaaaaacaaactctagctaatgaatcaagaagttgaatgagtctaaacaggaaaggaaagagggttggaaggaggatg

SEQ ID NO: 2462 - DNA, 22 bp, Homo sapiens
tgagaagagagaggagggatca

SEQ ID NO: 2463 - DNA, 20 bp, Homo sapiens
cagcaggaactctggcttct

SEQ ID NO: 2464 - DNA, 140 bp, Homo sapiens
tgagaagagagaggagggatcattaaaattttttttttcatgaataattggtcatgtcagacaaggctgtcatagtcaggattttgaatgacctagaagtcagtcagtcattttcctctgagaagccagagttcctgctg

SEQ ID NO: 2465 - DNA, 401 bp, Homo sapiens
gaaactagagacaagtttgggaattggagagaataacttttctttttggagtcattggcacctgcagttgtgctgctgccataacacctgcctacagagagaatgactgcatcactgtcgtgcctgcctatcttaccccactgccagcttcacaggctgtctgatcagctctggtttccagggtgctcaggattgttattygacattccccactgcctggcacagtgtgtggctcatggtaggcctgtgtgcatgcttactggatggatggaataagcggttgtatccagctacctcttcttttctcgcttcttcttaacttggtacagttgtcttcctttgccctcctcgcttccatccttccttccctgcttcctttgtactcatttttactcctcagc

SEQ ID NO: 2466 - DNA, 20 bp, Homo sapiens
tcgtgcctgcctatcttacc

SEQ ID NO: 2467 - DNA, 20 bp, Homo sapiens
tgccagagtgctgaggagta

SEQ ID NO: 2468 - DNA, 293 bp, Homo sapiens
tcgtgcctgcctatcttaccccactgccagcttcacaggctgtctgatcagctctggtttccagggtgctcaggattgttattcgacattccccactgcctggcacagtgtgtggctcatggtaggcctgtgtgcatgcttactggatggatggaataagcggttgtatccagctacctcttcttttctcgcttcttcttaacttggtacagttgtcttcctttgccctcctcgcttccatccttccttccctgcttcctttgtactcatttttactcctcagcactctggca

SEQ ID NO: 2469 - DNA, 255 bp, Homo sapiens
gaaactagagacaagtttgggaattggagagaataacttttctttttggagtcattggcacctgcagttgtgctgctgccataacacctgcctacagagagaatgactgcatcactgtcgtgcctgcctatcttaccccactgccagcttcacaggctgtctgatcagctctggtttccagggtgctcaggattgttattygacattccccactgcctggcacagtgtgtggctcatggtaggcctgtgtgcatg

SEQ ID NO: 2470 - DNA, 20 bp, Homo sapiens
agcggttgtatccagctacc

SEQ ID NO: 2471 - DNA, 20 bp, Homo sapiens
tgccagagtgctgaggagta

SEQ ID NO: 2472 - DNA, 135 bp, Homo sapiens
agcggttgtatccagctacctcttcttttctcgcttcttcttaacttggtacagttgtcttcctttgccctcctcgcttccatccttccttccctgcttcctttgtactcatttttactcctcagcactctggca

SEQ ID NO: 2473 - DNA, 21 bp, Homo sapiens
tgaaccaccacttgatgtcag

SEQ ID NO: 2474 - DNA, 20 bp, Homo sapiens
agcatgggaagtcagcgtta

SEQ ID NO: 2475 - DNA, 395 bp, Homo sapiens
tgaaccaccacttgatgtcagagaaatagcaggtagcaatagctgcaacagctaatcactattggcagttgacaagatgtacaaacacttgcttgtatatcatgtcatattgttgtcctcacggtaaaccatcacagccagtaaaggacaaagccagaattcaacctaggccttcccattacaaatcaaatactttttgtttattattgttattatttttagagatgaggtttcactgtgttgtccaggctggtctagaactcctggcctgaagctgttctcccacctgagtggctgggattacaggtgggagtcaccatgcctggctctgctttttgtactatgttgttttgtttgatggtttggttttgtttttaacgctgacttcccatgct

SEQ ID NO: 2476 - DNA, 23 bp, Homo sapiens
tttacagacctgtttggtagctt

SEQ ID NO: 2477 - DNA, 21 bp, Homo sapiens
gcctccaacctaaggcatatc

SEQ ID NO: 2478 - DNA, 270 bp, Homo sapiens
tttacagacctgtttggtagcttagctttcagatgactgttttgcagaggggagtgggtggggtgggtggcagcagtggagacagctgcatggtcaatcagggggtgagtagaaacagatctgccagaggatttagcagtcttgatgaatctaattatttatttctatattttgtgaccatatggtacctagggtggttataaagattagaaaacaatcaccaagttaccaaataccctgttaagaagtgatatgccttaggttggaggc

SEQ ID NO: 2479 - DNA, 20 bp, Homo sapiens
ccagggactctcttgggaaa

SEQ ID NO: 2480 - DNA, 27 bp, Homo sapiens
actgttacatatcatcactgcaaataa

SEQ ID NO: 2481 - DNA, 269 bp, Homo sapiens
ccagggactctcttgggaaaaaaaaaaagtatgtaaccttccgtagcatacttttttcactcaagatttcttttgacatttggctatgttagtacatttcttttacctgcagtatagcattccattgtgttaatataagtgtatattacatattgtaacataatttataattatatataattatataaatatatatttataattattgattacaaactatagttgtaaattatatgttgcaattatttgcagtgatgatatgtaacagt

SEQ ID NO: 2482 - DNA, 20 bp, Homo sapiens
tcagtgcccttactcctggt

SEQ ID NO: 2483 - DNA, 20 bp, Homo sapiens
agaagcagctggcaagaaag

SEQ ID NO: 2484 - DNA, 379 bp, Homo sapiens
tcagtgcccttactcctggttgtgtttgtgctggagtgggaaggtgtgtaggcagctgactggttaactgcagtcaaggatataaacaatggcctcctctaaggaaaaaaattacattgctgacatccaaggccccatcatctctcaccaggctcttactggtttccgtgtctccagtgtctttctcacccttcttcccacaaatctgtcttccaccctgccagaataactctcagaatctcatacttggcatgatgctacttctcctcttaaaacaaaagaaaacaaactcagggtcccataagacttatggtaaggtccattcttcttagcaatataaccctcatctgtactttcagctttcttgccagctgcttct

SEQ ID NO: 2485 - DNA, 690 bp, Homo sapiens
tgtgccttggacccccttaaagattttaaataagaaatctgatatgtaaaataaaggaggatcagtcaaaaagtgttcttagtagaatatgtatctagcagtcactctttgtgaaaaatggaaattgggaaaatattttgagagagattctatcagtggggacaagcaagcataaacatgttatgcttatcccaagatctattaatttccagtagaagtagggagagtaaattattgccaagggagatactgcccagttttcttaatggtcagaaaatgaatgacagtttcaatttcagctgctgtccctgggctgggcctgctgacttgccccaagtgccttggcacagaccgtggtgtggccagtggaaacatcgtgtctgtagcccygtgaatgagcagttcctctttgggggtcagctcagcatgttgccaggccagggggcaggtcaggccgaggctccactgttagccttgacttcccctgccaggagatgtggggccattatggcagaagaggagctaaggagaaacacctagcttggagccttgagtcttcaactttcacctcaagttactctccttaaagaccagcactttctttcccacttttcttgaaagcctctaggtccctgatcctgtttcaaactgctggtatataaactgctcataccactctgagttatcact

SEQ ID NO: 2486 - DNA, 826 bp, Homo sapiens
ctgctgtccctgggctgggcctgctgacttgccccaagtgccttggcacagaccgtggtgtggccagtggaaacatcgtgtctgtagcccygtgaatgagcagttcctctttgggggtcagctcagcatgttgccaggccagggggcaggtcaggccgaggctccactgttagccttgacttcccctgccaggagatgtggggccattatggcagaagaggagctaaggagaaacacctagcttggagccttgagtcttcaactttcacctcaagttactctccttaaagaccagcactttctttcccacttttcttgaaagcctctaggtccctgatcctgtttcaaactgctggtatataaactgctcataccactctgagttatcactttgttagggctgagtagcagggtggcccttaaacaggcctgactttcagtggctctgcccacgtttgcagaagtcacagtgggaaattttcacatttttctctgtccttctaagatgggacagttgagaggactcaggaagggttgagggagaaagcagcaagcccagagttcagaatcggttgccttgcagcttgtccttttgtggtgggtgatttcacttggtttttcaagtgaagggctgcaagtacaaatggactagccctaaaggacattacccacatgcatagagccatgaggcacattgattgtttcccataggccactttgcttcccgttgaggaaggaaccattgtgctactaatattattccactgcaagggcctggctggaggcatctgcaaagactcttcagggccctgattgcacatttgac

SEQ ID NO: 2487 - DNA, 20 bp, Homo sapiens
gaaacccaggatgagctgtc

SEQ ID NO: 2488 - DNA, 20 bp, Homo sapiens
ctaaaggcccggaatcactt

SEQ ID NO: 2489 - DNA, 244 bp, Homo sapiens
gaaacccaggatgagctgtcattctgagtaacaggcttgtgcaggtgctgactagcttgacttcccttgattcagtgcaaaccttgggaccctggaggcagtcctggtctcttagtaaaatgcaggtgtgtgtgtgttgctgagtaccagagattttggagcctcgatactttcctcatttgtatgtggacctacctaagaatatattttctctaggttcaccaaagtgattccgggcctttag

SEQ ID NO: 2490 - DNA, 20 bp, Homo sapiens
tcctcttccacctccctctt

SEQ ID NO: 2491 - DNA, 20 bp, Homo sapiens
cacaagctgaatgccagaaa

SEQ ID NO: 2492 - DNA, 268 bp, Homo sapiens
tcctcttccacctccctcttgaccctctatctcccaaataattagcatcttagtagctacctagcaaagtcaaggtaatttgaataaaattggattgtataatactcttatctttccattagtttgcaaatgtagtccttcaaagtgtgtagtgttatttttcccagtcctctgttctaggcagttatagagcatgagcctggacgtgagagctcatgcatgcatgcaggcacaatgggacccattgatttctggcattcagcttgtg

SEQ ID NO: 2493 - DNA, 20 bp, Homo sapiens
actccaccctgtcagcacat

SEQ ID NO: 2494 - DNA, 20 bp, Homo sapiens
ggagagtgggaagaacatgg

SEQ ID NO: 2495 - DNA, 380 bp, Homo sapiens
actccaccctgtcagcacatccagcccattggaaaatagtttccaggggatgtaggcagacttatatgggcagcttcttcagtgggattggtactatttagcaggctttcattttattatgaataacatggctttgcattataggcctagaagtgtccttaaaatctcatctcatggaagaggaacccaagattccacattctttagccttgcattcagggcctaccctcttctggcaccagcctgattttctaaatgttcagttatctcctgctaaacctggaaacatttgctaacttctccgtacacataccacctcttcttgattctctgcctttgtttgtgcctttatgtcccccaccatgttcttcccactctcc

SEQ ID NO: 2496 - DNA, 20 bp, Homo sapiens
gcatggtcctcaccctgata

SEQ ID NO: 2497 - DNA, 20 bp, Homo sapiens
ggcctttgatgttagcctgt

SEQ ID NO: 2498 - DNA, 143 bp, Homo sapiens
gcatggtcctcaccctgataaataagcatggttgagactctactcctgactgttagctagtttaggcccaagtttcactattttgaggttgttttgttttactagagccagaccaatatgtacacaggctaacatcaaaggcc

SEQ ID NO: 2499 - DNA, 20 bp, Homo sapiens
ccctcaactgctggtgtttc

SEQ ID NO: 2500 - DNA, 20 bp, Homo sapiens
agggccactgggttatcact

SEQ ID NO: 2501 - DNA, 257 bp, Homo sapiens
ccctcaactgctggtgtttctcaaagacctatggtgttttgctgatttggggccattgcctcagtggatttctgttaccatccataactagagtttactggtgtttcctttctttctttgcggttgtctaggcctttgtgagtagcagtggcctgttgagtgcctaagagaatcagcacactacctgaccccctgtttgggagtatgtggcagaggctgtttatttcaggctttggcagtgataacccagtggccct

SEQ ID NO: 2502 - DNA, 20 bp, Homo sapiens
tttgcaagtcacgttggttt

SEQ ID NO: 2503 - DNA, 20 bp, Homo sapiens
ggttggtccttcctccattt

SEQ ID NO: 2504 - DNA, 121 bp, Homo sapiens
  misc_feature 61: n = A,T,C or G
ggttttctactaagcatctactatctcctggattatttgtcaggtactagggatacaaaantgagcagaacaagtctctgccctatggcttagatgtgtgggttggtggttattggggaaa

SEQ ID NO: 2505 - DNA, 20 bp, Homo sapiens
tattccctgctttccacacc

SEQ ID NO: 2506 - DNA, 20 bp, Homo sapiens
cacagccacataggctttca

SEQ ID NO: 2507 - DNA, 383 bp, Homo sapiens
tattccctgctttccacaccttgttttgaaggagctcaagtatttgttctgtttgttaaattgaatgctttgacccctggggcctttcctggagcttattttgctttgcttgttttggaatgttgtaaaagtttgttttgttttaatttgcctccttctgaaaggttggcctgcaaaaccaacaaaaccagggaacctttagaaaggctggtgagggtcctcagcagttagtttctgctgagggtgtcaggctgaggcgacggaggtggtggaagtatcagctagatcattttgcgtctcatctgcattgttaccagggtggactttgactgaatgcctactgtgtgcactccctgtgctcactgaaagcctatgtggctgtg

SEQ ID NO: 2508 - DNA, 19 bp, Homo sapiens
gttggccaggactctgctc

SEQ ID NO: 2509 - DNA, 21 bp, Homo sapiens
gcctaagaagaaagggtccaa

SEQ ID NO: 2510 - DNA, 430 bp, Homo sapiens
gttggccaggactctgctcttggtcaagaggatcatattttttcatgtgttctttttcttttcttttcttttctttttttaaacagagtctcactttgtcgcccaggctggagtgcagtggtgcaatctcagctcactgcaacctctgcctcatgggttcaagcaattcttgtgcctcagcctcctgagtagctgggtctagaggtgtgcatcaccacacctggctaatttttgtatttgtagtagagatggggattcaccgtgttgaccacgctggtctcgaactcctgacctcaagtgatccgcccaccttgacctcccaaagcgctgggattgtaggcgtgagccactgtacccagccttttcacatgttcttagtgtcttaaaatgacttgccttttttttttttttggaccctttcttcttaggc

SEQ ID NO: 2511 - DNA, 20 bp, Homo sapiens
tggtgcagtgactctggaaa

SEQ ID NO: 2512 - DNA, 23 bp, Homo sapiens
tcattctctttatggcttctgga

SEQ ID NO: 2513 - DNA, 235 bp, Homo sapiens
tggtgcagtgactctggaaagaggaacccagtgacgggacactgtgcaccctttttgaatttaataccttgtatatttcccatgagtctgttttttttgttttgttttgttttgtaaaagtattttagataacaaaaacctaatccctaaagcattacaagaaaatactggagagtatgtttataaactcagagtagagaaagagtccttaatccagaagccataaagagaatga

SEQ ID NO: 2514 - DNA, 20 bp, Homo sapiens
gcacctacccagctttgttt

SEQ ID NO: 2515 - DNA, 20 bp, Homo sapiens
gatggctccctaccctcaat

SEQ ID NO: 2516 - DNA, 139 bp, Homo sapiens
gcacctacccagctttgttttgttaatagctttttaaaaatggcatcttttttttagtggcatcacctaaaaaaagaaaagaaaaagtgccttttctccccatctcaagtgataagcaaattgagggtagggagccatc

SEQ ID NO: 2517 - DNA, 22 bp, Homo sapiens
ccagggtttggttaacagttcc

SEQ ID NO: 2518 - DNA, 22 bp, Homo sapiens
agacatgaagacccaaggaagg

SEQ ID NO: 2519 - DNA, 1661 bp, Homo sapiens
tcttcaaaggagagtaacgatagctgtctcacagagttgtcaggacaaataaggcgggaggtgaaggtgcttttgaaactaggcagtcctgtatatcagtggaaaatgtggaatttatcatgggatagagacaggtggtgccattgactactatagtcagagaatggaagatgcacagggggtttgggaagcctcccagggaatctatcagaaatcccctctcaggccaagagtgcacgtttttattatacaatagagtcttttctgacattgatagtggaaacaaggccaacatttttcctcctttcactgtgatttattatgtgtgttacaggctttattacataatacaggctttattaaaactattatgtctagatctctataggttcaagactttagagtctgccgttcatttatggatggaattctcttaaggcatggtggggagggagggggaaatgttgcaagcagccacttcccctgttgccagtatacttcccctctgtcagtggcaacctgagtttccagggtttggttaacagttcctccaaggaaagggttatttcctcctcctgtgtttcctgtagaggccttcagagctgcgtcactgagagcagactcctactggatacctcaccactgtacccctgctctctccctgtctttgcagtgtgccccctaccaccggagccagagaatggtggctacatctgccacccccggccctgcagagaccccctgacagcaggcagtgtcatcgaatacctgtgtgctgaaggctacatgttgaagggcgattacaaatacctgacgtgtaagaatggcgagtggaaaccagccatggagattagctgccgtctcaacgagggtcagtctggcagatgaaaaagggatgctgctggggttctgctttctgttaactcacaggatgcaaagcatgcttcctccagagcactctttgctgtggtgcagcccagccccagttgatgctctgcagcctcccttccttgggtcttcatgtctttgtggaagatacttgaggttgctggtgcatgtcctattgcatttcattgagccatctgccctgctctgtaaagcccgtttgatgttcaggatctcttgtttgcatggccaagtgttggtgacccttgaccatgttctgccctcacagtgagcacaatgctaataccttctctaatgtatcgtccatttcatttttccttgaatggagctacagaccagctggacaaaagacctcccacccttactgcttcctcctgtcttgcatgacaggaaaatccacctgcttgcaggaaagtgtgtcatataaccatctttgtgcttcccactcaggcttcaagaccagagcatgtttaacccatgacaccccagaaatgggtgggaaccaacctgagagttacaattaaagctgtggatcttaagacaaggttttattacagtccagtttctgtaaattaatcctgccacttgggaagaacataggtagaacttaagatggtggaatgacatgcccagttaaattgtcgatgtttacaaacttcaagcttttgaggatgggatcaaagtggtttataaaggtaaaatctctagggttaagtgagtttatgtgtcagatggacctcaaagattggaagtga

SEQ ID NO: 2520 - DNA, 22 bp, Homo sapiens
tcagatggacctcaaagattgg

SEQ ID NO: 2521 - DNA, 22 bp, Homo sapiens
gacacacacagacccacagaga

SEQ ID NO: 2522 - DNA, 1392 bp, Homo sapiens
gttggtgacccttgaccatgttctgccctcacagtgagcacaatgctaataccttctctaatgtatcgtccatttcatttttccttgaatggagctacagaccagctggacaaaagacctcccacccttactgcttcctcctgtcttgcatgacaggaaaatccacctgcttgcaggaaagtgtgtcatataaccatctttgtgcttcccactcaggcttcaagaccagagcatgtttaacccatgacaccccagaaatgggtgggaaccaacctgagagttacaattaaagctgtggatcttaagacaaggttttattacagtccagtttctgtaaattaatcctgccacttgggaagaacataggtagaacttaagatggtggaatgacatgcccagttaaattgtcgatgtttacaaacttcaagcttttgaggatgggatcaaagtggtttataaaggtaaaatctctagggttaagtgagtttatgtgtcagatggacctcaaagattggaagtgaggggaattttttattcaggaaacaggatagggaaatggtccttttccaaaagaactgtgtatacataggtcattctaagctgttattcctgaaatgaccctgaccgtaggatgtctgtattgcaccattcaggaggcatttgacaagatcagctgtggggcccatcagctgttttgtgtatttgggtacaaaacccttctgatgatggcttgtttttatagataaagacacccacacatcacttggggtccccacgctgtctatagtggcttctactgccagctccgtggcgctcattctcctcctcgtggtgctgtttgtgctgctgcagccaaagctgaagtctttccatcatagcaggtgagtccagtggcagagctgacatgagacaggcaggtgcaagcattactgtgggggccagtctttggtggagggttgctggtggccccaatctctgtgggtctgtgtgtgtccagggagtggggagggccctgccatgtgtcaaactcctagatgtgcctaccattgtgcttattgctttgcatacattatcttaatcctcataggaacattgcagatgaggaaattgaggctcagagaggttattcactcagggttatacctctagatgacaacagagctcagaactgaggctgcgcgcggtggctcatgcctgtaatctcagcacttagggaggctgaggtgggcggattgcctgaggtcaggagtttgagaccagcttgaccaacatggtgaaaccctgtctctactaaaaatacaaaacaattagccgggtgtggtggcgcgcgcctgtagtcccagctactctggaggctgaggcaggagaatcacttgaacccacgaggcagag

SEQ ID NO: 2523 - DNA, 798 bp, Homo sapiens
aaaagaactgtgtatacataggtcattctaagctgttattcctgaaatgaccctgaccgtaggatgtctgtattgcaccattcaggaggcatttgacaagatcagctgtggggcccatcagctgttttgtgtatttgggtacaaaacccttctgatgatggcttgtttttatagataaagacacccacacatcacttggggtccccacgctgtctatagtggcttctactgccagctccgtggcgctcattctcctcctcgtggtgctgtttgtgctgctgcagccaaagctgaagtctttccatcatagcaggtgagtccagtggcagagctgacatgagacaggcaggtgcaagcattactgtgggggccagtctttggtggagggttgctggtggccccaakctctgtgggtctgtgtgtgtccagggagtggggagggccctgccatgtgtcaaactcctagatgtgcctaccattgtgcttattgctttgcatacattatcttaatcctcataggaacattgcagatgaggaaattgaggctcagagaggttattcactcagggttatacctctagatgacaacagagctcagaactgaggctgcgcgcggtggctcatgcctgtaatctcagcacttagggaggctgaggtgggcggattgcctgaggtcaggagtttgagaccagcttgaccaacatggtgaaaccctgtctctactaaaaatacaaaacaattagccgggtgtggtggcgcgcgcctgtagtcccagctactctggaggctgaggcagga

SEQ ID NO: 2524 - DNA, 20 bp, Homo sapiens
tgcctgtgtacccagaggtt

SEQ ID NO: 2525 - DNA, 27 bp, Homo sapiens
caaaggatgaattagaataaacacaca

SEQ ID NO: 2526 - DNA, 299 bp, Homo sapiens
tgcctgtgtacccagaggttaagaacacagtttttggaggctgatggaaccggattcaaatcctagctccatcctttaccagctgtgtgattgagggcaagttaattaacttctctgagcctcatttgcattcttggtgaatccctacctgaaagggctcaggtgagaatccagcatgataaggtgtttaaaattcctagtgctttgcctggcacatagtaagtgctcaaaaatggtggcggctgctattattattatcatgcctgtttctctgtgtgtttattctaattcatcctttg

SEQ ID NO: 2527 - DNA, 22 bp, Homo sapiens
cctcatttgcattcttggtgaa

SEQ ID NO: 2528 - DNA, 22 bp, Homo sapiens
cctgatgcaccatcacagtctc

SEQ ID NO: 2529 - DNA, 532 bp, Homo sapiens
agggcaagttaattaacttctctgagcctcatttgcattcttggtgaatccctacctgaaagggctcaggtgagaatccagcatgataaggtgtttaaaattcctagtgctttgcctggcacatagtaagtgctcaaaaatggtggcggctgctattattattatcatgcctgtttctctgtgtgtttattctaattcatcctttgtcttttcctcctccactccaggcgtgaccagggggtatctggggaccaggtctccatcatggtggatggagtccaggttgcactaccatcatacgaggaggctgtatatggcagttctggtcactgtgtgccacctgctgaccccagagtacagattgtgctgtcagaagggtctgggcccagtgggaggagcgtgccaagggagcaacagctgccggaccaaggggcctgctcctctgcaggtggagaagatgaggccccaggccagtctggactatgtgaagcctggggctctcgggcctcagagactgtgatggtgcatcagg

SEQ ID NO: 2530 - DNA, 912 bp, Homo sapiens
cagatttttcttgtgttctgttttctgtatttgtgttcaaagtttttaaaaagtttacaaacttttaaaaaaagcagtatggctgagtcagaacaaaattattgtgatttctagtccagtatcccacacttccctgttttttaacagctttattgagatatattccacataccatacagtgtacctatttaatgtgtacagtgaagtggtttttagtatattcacagatatatgccaccatcattctctcacttccttattttagctgtgctgaatgaatgcctttatttctgggtctctaggctcctagtttttccacagggtaaaagggccaggtgcctgtgtacccagaggttaagaacacagtttttggaggctgatggaaccggattcaaatcctagctccatcctttaccagctgtgtgattgagggcaagttaattaacttctctgagcctcatttgcattcttggtgamtccctacctgaaagggctcaggtgagaatccagcatgataaggtgtttaaaattcctagtgctttgcctggcacatagtaagtgctcaaaaatggtggcggctgctattattattatcatgcctgtttctctgtgtgtttattctaattcatcctttgtcttttcctcctccactccaggcgtgaccagggggtatctggggaccaggtctccatcatggtggatggagtccaggttgcactaccatcatacgaggaggctgtatatggcagttctggtcactgtgtgccacctgctgaccccagagtacagattgtgctgtcagaagggtctgggcccagtgggaggagcgtgccaagggagcaacagctgccggaccaaggggcctgctcctctgcaggtggagaagatgaggccccaggccagtctggacta

SEQ ID NO: 2531 - DNA, 22 bp, Homo sapiens
gccagtctggactatgtgaagc

SEQ ID NO: 2532 - DNA, 22 bp, Homo sapiens
tttgtaggcaaataccccaggt

SEQ ID NO: 2533 - DNA, 443 bp, Homo sapiens
ccaagggagcaacagctgccggaccaaggggcctgctcctctgcaggtggagaagatgaggccccaggccagtctggactatgtgaagcctggggctctcgggcctcagagactgtgatggtgcatcaggcaaccacctcttcctgggtggccggctcagggaaccgccaactggcacacaaagaaactgcagattcagagaacagtgacatacaaagccttttatccctcacgtcagaggagtacacagatggtgagtggtccaagctgaacatgaattattagctgcttagggtccttgctgggagtgaggaaggactgtgagcctttctaaataattggtatatttttagcaaaaaaaagatagtacctggggtatttgcctacaaaatagaatttcaccctcagagtactgagtagggctttgggctctctgtagtgag

SEQ ID NO: 2534 - DNA, 22 bp, Homo sapiens
ggtagggagtttttgcctacct

SEQ ID NO: 2535 - DNA, 22 bp, Homo sapiens
gcacaagtaaacacagcagcac

SEQ ID NO: 2536 - DNA, 660 bp, Homo sapiens
caggctgaacattgagtttttttcacataggcactgggaaagataagctagaaagtcataaaaaaggaggtagggagtttttgcctacctagaagtgtatgagtgggacatttactttctttaaattaggggctatgtaggatagcccctaagttgcagtggggtcgagagtgctctagagttccacacaaggtaaccactgtgcttttcttctggtcttcctgcagatattccactgttgaaagaagcatgagggcagcggccagcctttcctctctgcgaggttctctcagcccttcctccctctccctgtgggattgagcaccctgtactctccagccaccttacctggatacctgagctgccacctgtgtatctgtgtatctctgagggccctataggcccaccttgctggaaactcaaggaagattctcgccatctgcctgttggacagctggaggagctggctctttgcctggccccgccttcccatctgtcagagacatatttgaatgtgctggatcaaaccctcccttttcctaagcctctgggtcccctccagccagctctttggcggcagcccccaccagctcctgtgggcctgagtgctgctgtgtttacttgtgcctttcccccaccctgtccagtttccctgtcatg

SEQ ID NO: 2537 - DNA, 22 bp, Homo sapiens
ctcccttttcctaagcctctgg

SEQ ID NO: 2538 - DNA, 22 bp, Homo sapiens
cgatgctggaagtaggaagtga

SEQ ID NO: 2539 - DNA, 660 bp, Homo sapiens
ctggccccgccttcccatctgtcagagacatatttgaatgtgctggatcaaaccctcccttttcctaagcctctgggtcccctccagccagctctttggcggcagcccccaccagctcctgtgggcctgagtgctgctgtgtttacttgtgcctttcccccaccctgtccagtttccctgtcatgcagacttgttgctgtccacaagccttagtggctgcactgctgccccctgccacacagggggccgggcctgggtctgtcctgtttcctttgagggttgcccctactgccctttgcaggaacagatccaggtgtgagagctcttgagtcaagagtggcagaagtggctctaattggggtgagagtgtagtccctgggcttgccctgggttgaccctggtggcatatttccttggccgaggatggaagatttggagaatcatgtccatgctggcccaggacccagccatctggcccaaaggcacaagctcctggccctgttgagttgagagtttccaagaagcatccagaagatcccaagggagagaaggaaaatggctgataatgattgtcttcctaatatgcaagttctcacttcctacttccagcatcggccttcctggccttgtcttttttttgtttccctggagtataatggg

SEQ ID NO: 2540 - DNA, 798 bp, Homo sapiens
gcctctgggtcccctccagccagctctttggcggcagcccccaccagctcctgtgggcctgagtgctgctgtgtttacttgtgcctttcccccaccctgtccagtttccctgtcatgcagacttgttgctgtccacaagccttagtggctgcactgctgccccctgccacacagggggccgggcctgggtctgtcctgtttcctttgagggttgcccctactgccctttgcaggaacagatccaggtgtgagagctcttgagtcaagagtggcagaagtggctctaattggggtgagagtgtagtccctgggcttgccctgggttgaccctggtggcatatttccttggcygaggatggaagatttggagaatcatgtccatgctggcccaggacccagccatctggcccaaaggcacaagctcctggccctgttgagttgagagtttccaagaagcatccagaagatcccaagggagagaaggaaaatggctgataatgattgtcttcctaatatgcaagttctcacttcctacttccagcatcggccttcctggccttgtcttttttttgtttccctggagtataatgggaagttgcatgctgcctcctgggttttatcccagatagctctggctttcttgctgcccacaggggcctggggcaggaaggagacttgctgagatgccatggagtgcccatctggtcactggcagtctgggcaggttgcccctttctgggtttgtggtgacggaggggaggccgagaggcacagaccaagtccccgggtggctgcagg

SEQ ID NO: 2541 - DNA, 22 bp, Homo sapiens
tcccaagggagagaaggaaaat

SEQ ID NO: 2542 - DNA, 22 bp, Homo sapiens
atggactgtttctcagcccttc

SEQ ID NO: 2543 - DNA, 660 bp, Homo sapiens
cccagccatctggcccaaaggcacaagctcctggccctgttgagttgagagtttccaagaagcatccagaagatcccaagggagagaaggaaaatggctgataatgattgtcttcctaatatgcaagttctcacttcctacttccagcatcggccttcctggccttgtcttttttttgtttccctggagtataatgggaagttgcatgctgcctcctgggttttatcccagatagctctggctttcttgctgcccacaggggcctggggcaggaaggagacttgctgagatgccatggagtgcccatctggtcactggcagtctgggcaggttgcccctttctgggtttgtggtgacggaggggaggccgagaggcacagaccaagtccccgggtggctgcaggcagctccagcccggtcctgaggatcctcctcaccatggtcacgtgccttagtaactgtgcccaggaagtggcctgctgcttgctgtgctgctgcttttcctacttctgcccttccctgccacccctcgcatgtcacagctgacaagcaattccttgtcttccctggccccctgggggaagggctgagaaacagtccatgtgcaccccaaccttaatggcctgaggtgggcagaggggtgtggagcagcctggagta

SEQ ID NO: 2544 - DNA, 20 bp, Homo sapiens
gagaggcacagaccaagtcc

SEQ ID NO: 2545 - DNA, 20 bp, Homo sapiens
gggaagggcagaagtaggaa

SEQ ID NO: 2546 - DNA, 151 bp, Homo sapiens
gagaggcacagaccaagtccccgggtggctgcaggcagctccagcccggtcctgaggatcctcctcaccatggtcacgtgccttagtaactgtgcccaggaagtggcctgctgcttgctgtgctgctgcttttcctacttctgcccttccc

SEQ ID NO: 2547 - DNA, 22 bp, Homo sapiens
gcttttcctacttctgcccttc

SEQ ID NO: 2548 - DNA, 22 bp, Homo sapiens
gggtggtaaagtgcgtgtgtaa

SEQ ID NO: 2549 - DNA, 660 bp, Homo sapiens
cttagtaactgtgcccaggaagtggcctgctgcttgctgtgctgctgcttttcctacttctgcccttccctgccacccctcgcatgtcacagctgacaagcaattccttgtcttccctggccccctgggggaagggctgagaaacagtccatgtgcaccccaaccttaatggcctgaggtgggcagaggggtgtggagcagcctggagtacagggccctgggggaggagcccactgatgaggggcgctctcccatagccatgtgttgaatgctaactaggctggggtggacgaactctgccaactgctgtcatcttagaagatagatgcagcagtaaggaatgtttgttttgcttttttctgaaattttctgaagcactgtggctgggaaacttcgaagcggaccctgtgctgcatgtctgctcctcccctgagcctgtctgcttgggggtggtaaaaataaaaatcccagtttattttcagtaccttacctaacagggttggctccaggcgtgggtggcctagaagatgaggggagtggtcttctcccagccttttaccctcttgcctcctgcctccgcgcttacacacgcactttaccacccggtcattccctggcctcttgctgccacttgtagtcttccttccttcctctcagggt

SEQ ID NO: 2550 - DNA, 504 bp, Homo sapiens
taaagtgcgtgtgtaagcgcggaggcaggaggcaagagggtaaaaggctgggagaagaccactcccctcatcttctaggccacccacgcctggagccaaccctgttaggtaaggtactgaaaataaactgggatttttatttttaccacccccaagcagacaggctcaggggaggagcagacatgcagcacagggtccgcttcgaagtttcccagccacagtgcttcagaaaatttcagaaaaaagcaaaacaaacattccttactgctgcatctatcttctaagatgacagcagttggcagagttcgtccaccccagcctagttagcattcaacacatggctatgggagagcgcccctcatcagtgggctcctcccccagggccctgtactccaggctgctccacacccctctgcccacctcaggccattaaggttggggtgcacacggactgtttctcagcccttcccccagggggccagggaagacaaggaattgcttgtc

SEQ ID NO: 2551 - DNA, 22 bp, Homo sapiens
gaagatgaggggagtggtcttc

SEQ ID NO: 2552 - DNA, 22 bp, Homo sapiens
gggacaaaaccccagagtaaca

SEQ ID NO: 2553 - DNA, 660 bp, Homo sapiens
gtaaaaataaaaatcccagtttattttcagtaccttacctaacagggttggctccaggcgtgggtggcctagaagatgaggggagtggtcttctcccagccttttaccctcttgcctcctgcctccgcgcttacacacgcactttaccacccggtcattccctggcctcttgctgccacttgtagtcttccttccttcctctcagggtaagggcagtgcctgctgtgcctgttggccactcccacacttcccctcccccaggagccctcatctgctgtgctgagtccaggaaagcatagttaggtagggagctggttggagaaggtgctagaactagaaggcagatgagactagcatgggcccacctggagggctgtccctaatggccccagtcgccttacctcacccacagcagtgcccttgtcttcctccaaaacagaaagcagtgacaaaagggggaggggtggtaatctgaagtctcactgctgagccttcagcttttatttttcactgtttcaaaacccgcattctattctagaatggtttttaaaatggaagatcttacctttttctatcttgttactctggggttttgtccccctaagagattgcactttttgtttggggtttattcagctgcatagatgaccagcttgatcc

SEQ ID NO: 2554 - DNA, 20 bp, Homo sapiens
gtgggtggcctagaagatga

SEQ ID NO: 2555 - DNA, 20 bp, Homo sapiens
tccaaccagctccctaccta

SEQ ID NO: 2556 - DNA, 261 bp, Homo sapiens
gtgggtggcctagaagatgaggggagtggtcttctcccagccttttaccctcttgcctcctgcctccgcgcttacacacgcactttaccacccggtcattccctggcctcttgctgccacttgtagtcttccttccttcctctcagggtaagggcagtgcctgctgtgcctgttggccactcccacacttcccctcccccaggagccctcatctgctgtgctgagtccaggaaagcatagttaggtagggagctggttgga

SEQ ID NO: 2557 - DNA, 22 bp, Homo sapiens
actgtttcaaaacccgcattct

SEQ ID NO: 2558 - DNA, 22 bp, Homo sapiens
gcagctgtggagtccctaatct

SEQ ID NO: 2559 - DNA, 660 bp, Homo sapiens
gacaaaagggggaggggtggtaatctgaagtctcactgctgagccttcagcttttatttttcactgtttcaaaacccgcattctattctagaatggtttttaaaatggaagatcttacctttttctatcttgttactctggggttttgtccccctaagagattgcactttttgtttggggtttattcagctgcatagatgaccagcttgatccctggtgaaatgaaaagccttccttctcctgaagcctctttccgccctgccctccactaacaacactgaggagcacaagcccaggcttgcccacctggtaggaaaggaagaaattagaacaatgggagccttggctcccctctcgtctcctcccctccttcttgtcactggctttgatgaggcccacttcccagaggctcctgggcctgtgagtgcaggagctcattctcccctcactgctgaagtctgtgacagcttcttcctccagttatgtctttcttccaaagcaatttcttaaccatcagccatgtgctgctatttctagggcttctgggctttgtcccttactgagagattagggactccacagctgccttgaggtagggcctggctgagagacaagggtagcagcaggtggcaggctgttaaaagacaggctgcctgagga

SEQ ID NO: 2560 - DNA, 22 bp, Homo sapiens
attagaacaatgggagccttgg

SEQ ID NO: 2561 - DNA, 22 bp, Homo sapiens
cattctcctgcatcagcctctt

SEQ ID NO: 2562 - DNA, 454 bp, Homo sapiens
aattagaacaatgggagccttggctcccctctcgtctcctcccctccttcttgtcactggctttgatgaggcccacttcccagaggctcctgggcctgtgagtgcaggagctcattctcccctcactgctgaagtctgtgacagcttcttcctccagttatgtctttcttccaaagcaatttcttaaccatcagccatgtgctgctatttctagggcttctgggctttgtcccttactgagagattagggactccacagctgccttgaggtagggcctggctgagagacaagggtagcagcaggtggcaggctgttaaaagacaggctgcctgaggagcctggagcaggtggaaacaggtggaagaaaccggccacagccctgctttaccgggctcacctctagggcattccagcaagaggctgatgcaggagaatggccagcaccaaaggaca

SEQ ID NO: 2563 - DNA, 22 bp, Homo sapiens
catcagccatgtgctgctattt

SEQ ID NO: 2564 - DNA, 22 bp, Homo sapiens
aacgggaacacagcacataaaa

SEQ ID NO: 2565 - DNA, 660 bp, Homo sapiens
tcattctcccctcactgctgaagtctgtgacagcttcttcctccagttatgtctttcttccaaagcaatttcttaaccatcagccatgtgctgctatttctagggcttctgggctttgtcccttactgagagattagggactccacagctgccttgaggtagggcctggctgagagacaagggtagcagcaggtggcaggctgttaaaagacaggctgcctgaggagcctggagcaggtggaaacaggtggaagaaaccggccacagccctgctttaccgggctcacctctagggcattccagcaagaggctgatgcaggagaatggccagcaccaaaggacatttaaaagagtttttgggtttttttgtttgtttgttgttggtgtttgttttttttttttttttttggcacacttgagctgactcagtgcaggtttaatatcctggtgacttgcagtcacattctaatgactttcaagggccagaatatggtgaaaatcacttaaaatatccgtcccttccatgccttagtttagcaggtaggctctatcttttgccatttctgtattttatgtgctgtgttcccgtttcactgggtatgaactgtgaaatggactgaatcctggccactttatgagtttgtttggttttataaggca

SEQ ID NO: 2566 - DNA, 20 bp, Homo sapiens
ctgggctttgtcccttactg

SEQ ID NO: 2567 - DNA, 20 bp, Homo sapiens
ttctggcccttgaaagtcat

SEQ ID NO: 2568 - DNA, 381 bp, Homo sapiens
ctgggctttgtcccttactgagagattagggactccacagctgccttgaggtagggcctggctgagagacaagggtagcagcaggtggcaggctgttaaaagacaggctgcctgaggagcctggagcaggtggaaacaggtggaagaaaccggccacagccctgctttaccgggctcacctctagggcattccagcaagaggctgatgcaggagaatggccagcaccaaaggacatttaaaagagtttttgggtttttttgtttgtttgttgttggtgtttgtttttttttttttttttttggcacacttgagctgactcagtgcaggtttaatatcctggtgacttgcagtcacattctaatgactttcaagggccagaa

SEQ ID NO: 2569 - DNA, 22 bp, Homo sapiens
tttggcacacttgagctgactc

SEQ ID NO: 2570 - DNA, 22 bp, Homo sapiens
ggcaagatgaatgggaaagaaa

SEQ ID NO: 2571 - DNA, 340 bp, Homo sapiens
tttggcacacttgagctgactcagtgcaggtttaatatcctggtgacttgcagtcacattctaatgactttcaagggccagaatatggtgaaaatcacttaaaatatccgtcccttccatgccttagtttagcaggtaggctctatcttttgccatttctgtattttatgtgctgtgttcccgtttcactgggtatgaactgtgaaatggactgaatcctggccactttatgagtttgtttggttttataaggcatttcaatgtacattctataaatacaagcactccatttgcaaacagatcttaagctaatattttctttcccattcatcttgccctc

SEQ ID NO: 2572 - DNA, 22 bp, Homo sapiens
cccttccatgccttagtttagc

SEQ ID NO: 2573 - DNA, 22 bp, Homo sapiens
cattaagctgtgaagcctgcat

SEQ ID NO: 2574 - DNA, 660 bp, Homo sapiens
aatatcctggtgacttgcagtcacattctaatgactttcaagggccagaatatggtgaaaatcacttaaaatatccgtcccttccatgccttagtttagcaggtaggctctatcttttgccatttctgtattttatgtgctgtgttcccgtttcactgggtatgaactgtgaaatggactgaatcctggccactttatgagtttgtttggttttataaggcatttcaatgtacattctataaatacaagcactccatttgcaaacagatcttaagctaatattttctttcccattcatcttgccctccccctcctcccgccagctttaaagttcagtggagaagccagatggcaattcagacaaaggtatactcttcctgcttcatgggtggtggcacgggaatagatagcccttagccctttccctcccaggcccagctgagccctcagaccacttgcttcccacataacaatgtcgcctccatttccgaggaacatccttgcgtagagaatgaaatatgctgcaatcatttctgcatccttactcctcacccccaaagaaaaaaaaaaggcctagcagggaagcagcatgcaggcttcacagcttaatgccaaggacagcgagtgaggctgggagcttctcttgggcctgctgggtct

SEQ ID NO: 2575 - DNA, 2001 bp, Homo sapiens
agcttttatttttcactgtttcaaaacccgcattctattctagaatggtttttaaaatggaagatcttacctttttctatcttgttactctggggttttgtccccctaagagattgcactttttgtttggggtttattcagctgcatagatgaccagcttgatccctggtgaaatgaaaagccttccttctcctgaagcctctttccgccctgccctccactaacaacactgaggagcacaagcccaggcttgcccacctggtaggaaaggaagaaattagaacaatgggagccttggctcccctctcgtctcctcccctccttcttgtcactggctttgatgaggcccacttcccagaggctcctgggcctgtgagtgcaggagctcattctcccctcactgctgaagtctgtgacagcttcttcctccagttatgtctttcttccaaagcaatttcttaaccatcagccatgtgctgctatttctagggcttctgggctttgtcccttactgagagattagggactccacagctgccttgaggtagggcctggctgagagacaagggtagcagcaggtggcaggctgttaaaagacaggctgcctgaggagcctggagcaggtggaaacaggtggaagaaaccggccacagccctgctttaccgggctcacctctagggcattccagcaagaggctgatgcaggagaatggccagcaccaaaggacatttaaaagagtttttgggtttttttgtttgtttgttgttggtgtttgtttttttttttttttttttggcacacttgagctgactcagtgcaggtttaatatcctggtgacttgcagtcacattctaatgactttcaagggccagaatatggtgaaaatcacttaaaatatccgtcccttccatgccttagtttagcaggtaggctctatcttttgccatttctgtattttatgtgctgtgttcccgtttcactgggtatgaactgtgaaatcgactgaatcctggccactttatgagtttgtttggttttataaggcatttcaatgtacattctataaatacaagcactccatttgcaaacagatcttaagctaatattttctttcccattcatcttgccctccccctcctcccgccagctttaaagttcagtggagaagccagatggcaattcagacaaaggtatactcttcctgcttcatgggtggtggcacgggaatagatagcccttagccctttccctcccagtcccagctgagccctcagaccacttgcttcccacataacaatgtcgcctccatttccgaggaacatccttgcgtagagaatgaaatatgctgcaatcatttctgcatccttactcctcacccccaaagaaaaaaaaaaggcctagcagggaagcagcatgcaggcttcacagcttaatgccaaggacagcgagtgaggctgggagcttctcttgggcctgctgggtctgtcagctctcggaatagggacagtccttactggtgccccaaggtgggacttggagaatattttgcttggcatatgtttggtctgaatggtgtagttgctggttccctagagaggaaaaggtggcaggcccagctttgctgggaaatggctcttaatttccagttgaaaccctagtagaattgtgaatgaaaacctcaaggttgagcccctctgccaagcagcagagctagtagaaggggatgcaggggcaaagcactcagttgccaagcaaggaggagagatgtacgtgggctgtgtggcagtccccacaccctgccctggcttcttcaggttatcgcaccactatggaatcctttgcagaatggtactcatataatggtttaaaacaacacattcataattgactctgtgcaggatgtcactcaatcagtttgggtttgctttattttattttatatatatattttttggtatcctgtacattgcagtgggtgtgaagatagtattttaatattt

SEQ ID NO: 2576 - DNA, 22 bp, Homo sapiens
atccttactcctcacccccaaa

SEQ ID NO: 2577 - DNA, 22 bp, Homo sapiens
ccatagtggtgcgataacctga

SEQ ID NO: 2578 - DNA, 596 bp, Homo sapiens
ttcccacataacaatgtcgcctccatttccgaggaacatccttgcgtagagaatgaaatatgctgcaatcatttctgcatccttactcctcacccccaaagaaaaaaaaaaggcctagcagggaagcagcatgcaggcttcacagcttaatgccaaggacagcgagtgaggctgggagcttctcttgggcctgctgggtctgtcagctctcggaatagggacagtccttactggtgccccaaggtgggacttggagaatattttgcttggcatatgtttggtctgaatggtgtagttgctggttccctagagaggaaaaggtggcaggcccagctttgctgggaaatggctcttaatttccagttgaaaccctagtagaattgtgaatgaaaacctcaaggttgagcccctctgccaagcagcagagctagtagaaggggatgcaggggcaaagcactcagttgccaagcaaggaggagagatgtacgtgggctgtgtggcagtccccacaccctgccctggcttcttcaggttatcgcaccactatggaatcctttgcagaatggtactcatataatggtttaaaacaacacatt

SEQ ID NO: 2579 - DNA, 22 bp, Homo sapiens
aggagagatgtacgtgggctgt

SEQ ID NO: 2580 - DNA, 22 bp, Homo sapiens
tccctacagagctagtgcctca

SEQ ID NO: 2581 - DNA, 584 bp, Homo sapiens
aaggttgagcccctctgccaagcagcagagctagtagaaggggatgcaggggcaaagcactcagttgccaagcaaggaggagagatgtacgtgggctgtgtggcagtccccacaccctgccctggcttcttcaggttatcgcaccactatggaatcctttgcagaatggtactcatataatggtttaaaacaacacattcataattgactctgtgcaggatgtcactcaatcagtttgggtttgctttattttattttatatatatattttttggtatcctgtacattgcagtgggtgtgaagatagtattttaatatttgtacaaagtttaatttaattttaattgttctatgtatataactgcatttctaaataattaaaaaaaagttcttatgaaggcaattctgggagatgtgatccttcctgaaagtttttgcagaaaccttagattgaaagagcatatgtgggcaggaggtcatggaaggatgaggcactagctctgtagggagggtgcctggcaagaggtggaggagccaggatggagagcactttgggaggccaaggcagttggatcacttgagac

SEQ ID NO: 2582 - DNA, 20 bp, Homo sapiens
ttcttcaggttatcgcacca

SEQ ID NO: 2583 - DNA, 20 bp, Homo sapiens
acccactgcaatgtacagga

SEQ ID NO: 2584 - DNA, 171 bp, Homo sapiens
ttcttcaggttatcgcaccactatggaatcctttgcagaatggtactcatataatggtttaaaacaacacattcataattgactctgtgcaggatgtcactcaatcagtttgggtttgctttattttattttatatatatattttttggtatcctgtacattgcagtgggt

SEQ ID NO: 2585 - DNA, 20 bp, Homo sapiens
tgtacattgcagtgggtgtg

SEQ ID NO: 2586 - DNA, 20 bp, Homo sapiens
catctcccagaattgccttc

SEQ ID NO: 2587 - DNA, 135 bp, Homo sapiens
tgtacattgcagtgggtgtgaagatagtattttaatatttgtacaaagtttaatttaattttaattgttctatgtatataactgcatttctaaataattaaaaaaaagttcttatgaaggcaattctgggagatg

SEQ ID NO: 2588 - DNA, 20 bp, Homo sapiens
attcctgctgcaatcctcat

SEQ ID NO: 2589 - DNA, 22 bp, Homo sapiens
cctttctcatcactaccaagca

SEQ ID NO: 2590 - DNA, 294 bp, Homo sapiens
attcctgctgcaatcctcattcactgacttgtttgctaattcattcaacaaacttttatttatttattcattcattttgaggactttacacaaagcctagtgttaggttctaggaacatagtgatgaacaagagccagtctttgcccttaaagagtttgtagaccaataggggagaaagagattaaacagctatctaaaacttaaggcacaacttaaaattgaaagaaacaaagaagcaaaaaacaaacctataatgatacaccctgaaaagtgcttggtagtgatgagaaagg

SEQ ID NO: 2591 - DNA, 26 bp, Homo sapiens
gaatcttctacacccttctgtacttc

SEQ ID NO: 2592 - DNA, 23 bp, Homo sapiens
ttccttctgtgtctaggtagcat

SEQ ID NO: 2593 - DNA, 429 bp, Homo sapiens
gaatcttctacacccttctgtacttcagaattttgaagcaagtgcatgtattacctgtttaataaattaattaaactaaaattatatattaaaaagtgaaatgcactgggcacagtggctcatgcctgtaatcccaacaccatgggaggctgaggcaggagaatctcttgaacccaggaattcaagaccagcctgggcaacatggtgagaccctcatctctaccaaaaatttaaaaaatgagctggtcatggtggtgcacacctgtggtcccagctacttgggaggctgaggtggaagaattgcttgagcccaggaggttgaggctgcagtgatctgtgtttatgccactgcacttcagtctgggtgacagagatcctgtctcagaacaaaacaaaacaaaatggcatgctacctagacacagaaggaa

SEQ ID NO: 2594 - DNA, 2001 bp, Homo sapiens
gaggctgggaagtcaaagggcagggaacctgcagatttggtgtctggtgagggctgctctctgcttccaagatggcactttctggctgcatcctctcatggtggaagggcgaaagggatgattcctacatcctcacatgggagaagagatggaagggcctaaagaggcctggctactgccctccagcacttcataagggcatgaatcccattctccagggtggaaccctcatgacctaatcaccttccaaaggcctcaccttttaataccatcaacttggggtttaagttccaccatataaattttggagggaggcacacattcaaaccatagcattctacttgcaggaatttttcctagagatatctttgctcatgtgtatataagttactcaatgcagtggtttaataaagcaaagatttgaaaaaaacctaaataatcaccaacatgggctggttaaatacatatgatatatccaaacataaaatgcatacaaaaaaaaaagaataatacagcctggcaccaatctgcagaatacattgtatgaaaaaggccaagtatggaggaatagaagaaataggccaagtatagaataggccaagtatagagatgcaatcatttgtgtacaaaaagagataaacagtgtcaatgtgcttgcttttgtatgcacagaggatctctgtaaatacaccccagacattgagaccactgggtgactctggagagaggttctggtgcttgggagagtgacatgggaggaagaatcttctacacccttctgtacttcagaattttgaagcaagtgcatgtattacctgtttaataaattaattaaactaaaattatatattaaaaagtgaaatgcactgggcacagtggctcatgcctgtaatcccaacaccatgggaggctgaggcaggagaatctcttgaacccaggaattcaagaccagcctgggcaacatggtgagaccctcatctctaccaaaaatttaaaaaatgagctggtcatggtggtgcacacctgtggtcccagctacttgggaggctgaggtggaagaattgcttgagcccaggaggttgaggctgcagtgatctgtgtttatgccactgcacttcagtctgggtgacagagatcctgtctcagaacaaaacaaaacaaaatggcatgctacctagacacagaaggaatagaaggaataaattaacaagaaattttaaaaatttatctgatctcttgttacaaattagtaatctgccttctgggacaggtcgcacagctccctgcagggccttgcttaagaacaataaacaattctcattgcctgctattttcatctacttaacccggaaaaataaaattatttgttgggactttcagtattatggatggaattgtgcccccttccccctgttcatatgttggagtgttgaaatcctaactctcagtccctcagaatgtgatcatatttggagatagggtctttaaagagggaattaagttaaaataaggtcactatgatggccctaatgcaatataactggtgtccctacaagaagaggaaatggaagaagatgtgaagacacagggagaagacagccttgtataagccaaggagagttttggaacagattttgccctcacaggcctggggatgaaccaaacttgatgacatcctgatattggacttccagcctccagaatctaagaacataaacgtttgttgtttaaacgatagtctatggactgttcaggctgcccggtctatggaagattgtaaaggcagccctagcaaacccatacattcagtctcagaagtgggagctggaccagggcttcttcccacaacaagaacccatccaggccaggtgcggtggctcatgcctgtaatcccagcactttgggaggctgaggtgggtggatcacttgaggtcagaagtttgagaccagcctagccaacatgatgaaaccccatctctactaaaaatacaaaaattagcc

SEQ ID NO: 2595 - DNA, 20 bp, Homo sapiens
agctgctctgtccttgaggt

SEQ ID NO: 2596 - DNA, 20 bp, Homo sapiens
gttcaagacccagctccaac

SEQ ID NO: 2597 - DNA, 270 bp, Homo sapiens
agctgctctgtccttgaggttctcacgactggcactaatagtgtcattaccgatctctgtcccccttcaaccttgactcctcagtgcctagcagggccggcccagaggccctgtatttcattgaattaggaaggaaggatggaggaagggcaggagagaggaaagaagggctgcaggaatgatgcagggagaccacgcagcggggaagggggtgcagagcagttggctagtgctttacagagcaagtgctgttggagctgggtcttgaac

SEQ ID NO: 2598 - DNA, 20 bp, Homo sapiens
gacctggagactgtggctct

SEQ ID NO: 2599 - DNA, 25 bp, Homo sapiens
aactcagatattaaaggacagaacg

SEQ ID NO: 2600 - DNA, 265 bp, Homo sapiens
gacctggagactgtggctctatggtgaagggcttcgagagccattctcttggtttgaagtatcttgtaggtgggcaaccgagaaggttttaaagcatgtgctaggtgtcataattaccaggggtggagacggtgcaacaggcagagacccatgaaacagaggtccatagaatatcctaccttataaataaaaattattattattttttgagacagtgtagaactgtgatctgatctgatacgttctgtcctttaatatctgagtt

SEQ ID NO: 2601 - DNA, 20 bp, Homo sapiens
ttcaccaggtggtgcagtaa

SEQ ID NO: 2602 - DNA, 21 bp, Homo sapiens
caagcaagtcagaggatccag

SEQ ID NO: 2603 - DNA, 247 bp, Homo sapiens
ttcaccaggtggtgcagtaagcacacagtttggagttcagtctacccaactacctggacaagaacacaagattccagtaagaaaaagaaggaatggggggttttcaatgaaagatgagaggtccatagccaataccctgtgtgtgtgtgtgtgtgtgtgtgtgtgtgtgtgtgtgtgtgtgtgtaccaggaccagaaccttataacagcagaatgtgagatctgaactggatcctctgacttgcttg

SEQ ID NO: 2604 - DNA, 22 bp, Homo sapiens
tcaatgaaagatgagaggtcca

SEQ ID NO: 2605 - DNA, 21 bp, Homo sapiens
caagcaagtcagaggatccag

SEQ ID NO: 2606 - DNA, 144 bp, Homo sapiens
tcaatgaaagatgagaggtccatagccaataccctgtgtgtgtgtgtgtgtgtgtgtgtgtgtgtgtgtgtgtgtgtgtgtaccaggaccagaaccttataacagcagaatgtgagatctgaactggatcctctgacttgcttg

SEQ ID NO: 2607 - DNA, 20 bp, Homo sapiens
gttggaaggcagatctccag

SEQ ID NO: 2608 - DNA, 20 bp, Homo sapiens
aggctggcaaagatgaagaa

SEQ ID NO: 2609 - DNA, 285 bp, Homo sapiens
gttggaaggcagatctccagatgcttttaaacaagcccaaaatacagtgtcttaggtgaaatagctcccaatttttaacagttagcaggtattaactctggttttaaatccaatataataagtttgtcattttgatttttgaatactgtgcaagtaagcaagtgacgggcaggggaggggggtggcggggaagagagagagagagagagagagaaacctatatggccagaggtttagttctctatgtaaattatcaatcctctttttcttcatctttgccagcct

SEQ ID NO: 2610 - DNA, 27 bp, Homo sapiens
aatttacattataaggtgcagagagaa

SEQ ID NO: 2611 - DNA, 21 bp, Homo sapiens
tttgcaagccagtaaatttgt

SEQ ID NO: 2612 - DNA, 180 bp, Homo sapiens
aatttacattataaggtgcagagagaaaaatttggattatagaaattataaaggccttttaaatacacacacacacacacacacacacacacacacacacacacacacacacacacaccctgcagcttttatttcagagcttttagccatgagataaatacaaatttactggcttgcaaa

SEQ ID NO: 2613 - DNA, 27 bp, Homo sapiens
aatttacattataaggtgcagagagaa

SEQ ID NO: 2614 - DNA, 21 bp, Homo sapiens
tttgcaagccagtaaatttgt

SEQ ID NO: 2615 - DNA, 180 bp, Homo sapiens; identical to SEQ ID NO: 2612

SEQ ID NO: 2616 - DNA, 20 bp, Homo sapiens
ctgctgcaggtgattcttgt

SEQ ID NO: 2617 - DNA, 20 bp, Homo sapiens
attgcttgaacccaggaagt

SEQ ID NO: 2618 - DNA, 400 bp, Homo sapiens
ctgctgcaggtgattcttgtgcacacttcaatttctggatcactcttctaactagtccgtgtcacatttacatccaagttggtggccagctgtgcatggtggactgggccatggctgctatttttaggtagcctggcttcataaccaggttctaccatgtatagttgtgatctaaacacattacttgactcagagtcttcatctttactatggggataacatcattctacttcacagtgttgtgataagacccattaaaccccactggtgcatacctatagtttatttatttatttatttatttattttttgagatggagtctcgttctgtcacccagggtgaagtacagtggtgtgatctcagtctcactgcagcctccacttcctgggttcaagcaat

SEQ ID NO: 2619 - DNA, 20 bp, Homo sapiens
gccgaaagaaagaaaaaagg

SEQ ID NO: 2620 - DNA, 20 bp, Homo sapiens
cgaatgcatacttgctgttg

SEQ ID NO: 2621 - DNA, 316 bp, Homo sapiens
  misc_feature 238: n = A,T,C or G
acaggggggctgggatgggaggattgctgccgaaagaaagaaaaaaggaaggaaagaaagaaggaaagagagaaaggaaggaaggaaggaaggaaggaaggaaggaaggaaggaagggatggttccaaatttcaacagcaagtatgcattcgaacccaagcattttatcccaaagagcctcaaacttttactatgtttcaaacaaataaatattggaggtagggctgagcacagtggntcatgcctgtaatcccagcacttcgggaggccaaggttggaggtttacttgagcccaggagtttaaggccagcccagt

SEQ ID NO: 2622 - DNA, 20 bp, Homo sapiens
agctggcttctcctcaagtg

SEQ ID NO: 2623 - DNA, 20 bp, Homo sapiens
ggatcctcacatgctggtct

SEQ ID NO: 2624 - DNA, 222 bp, Homo sapiens
agctggcttctcctcaagtgagtaatgtatacatttgtgtgtgtgtgtgtgtttgcgagagagagagagagagagagagagagagagagagagagagaggaaagtcatagttttttaaaacctaattgccaacgttttcacttcagccatattctattggttacatagaataaacttagtgcatgtgggagggtgtgtgtgaagaccagcatgtgaggatcc

SEQ ID NO: 2625 - DNA, 583 bp, Homo sapiens
tcctgtgtaactagataaccctgggacatagagcagactgggtctgctggcatatttttctaagtagatttatgtagcttaagtgtgtaacggagatttttcttccctttttgtagggttactattgaacatgctagggctcggtcacgaggtggaagaggtagaggacgatactctgaccgttttagtagtcgcagacctcgaaatgatagacggtatgtgaagggtggatggctgcattgaacaattattgtaggggtagcatttaagattcaggagtcattagcagtgatgattttgggtcctgccgtataatctgttcttctattcccacgttagccarttgttcttgatgaatctatatgagtcatagaacacaaatctattgacggaagtcattagaatggcttgtgatatctgatggcttgaacttgcccacagttgaacacaagtgctgtcattgcatttcttccattgtgaatacgaattttcttcctcagaaatgctccacctgtaagaacagaaaatcgtcttatagttgagaatttatcctcaagagtcagctggcaggtttgttgaaata

SEQ ID NO: 2626 - DNA, 583 bp, Homo sapiens; identical to SEQ ID NO: 2625

SEQ ID NO: 2627 - DNA, 20 bp, Homo sapiens
aagtggagcaggtggtcatc

SEQ ID NO: 2628 - DNA, 20 bp, Homo sapiens
ctccctttgctctccttcct

SEQ ID NO: 2629 - DNA, 226 bp, Homo sapiens
aagtggagcaggtggtcatcaagatgctgggtggatgggagaccaaggagagaagagagggattcaaataatggaaacgaattgctgagggcctggtcactcatgagagagctctggcggtggcatgggggaaatggaaggtgtttgagaggaagcgattgacagagagagagaggagtgagggggactactcctaaaacctggctaggaaggagagcaaagggag

SEQ ID NO: 2630 - DNA, 19 bp, Homo sapiens
ggtgggagacatgggaaga

SEQ ID NO: 2631 - DNA, 20 bp, Homo sapiens
ggagatcagaatggctcctt

SEQ ID NO: 2632 - DNA, 305 bp, Homo sapiens
ggtgggagacatgggaagaggggagagagagagagcccataaatacagactattttgttgagtgcctgctaagtgccactgtgctaagtgcttgacatatgtggcttcagttccttttccccataacattaggcagtaagcatactatcttcttttcgctgacaaggaagctggggactagaagagttgtgtcctgctcaaagtcgcacaaggtagtaagtggccaaggcagcatttgaacttagggtggttcaactgcttcaatccctgtgtgcttcattgtggaaggagccattctgatctcc

SEQ ID NO: 2633 - DNA, 462 bp, Homo sapiens
cctgtctagggagaggccctccagaaaggtcaactgagaaggaagctgatagggcatctccttagatttatggacatttacattaacaatatatggctctgacttttattccagtgggaagatggttgggaggtgagggcttggcaagatcttaggaaaaccacactcagtgtgtccctcctcctccccacagccctaccctccatctacacttctttcattatttctataaagatggaatatggcttaaatatgcatgaagagcagcctatatcaaaggttccagagcgtagccatcaagaacaataggtagrcatgtcataaggataagagctgttagaggtgagaagagtccctcaaagaaaattgtgaactaggtaataggaactcccccacccccgtgaacacttaaatacacacttgagcttgtaagaaattaacactcaatttaagtgtggcata

SEQ ID NO: 2634 - DNA, 587 bp, Homo sapiens
cctgtctagggagaggccctccagaaaggtcaactgagaaggaagctgatagggcatctccttagatttatggacatttacattaacaatatatggctctgacttttattccagtgggaagatggttgggaggtgagggcttggcaagatcttaggaaaaccacactcagtgtgtccctcctcctccccacagccctaccctccatctacacttctttcattatttctataaagatggaatatggcttaaatatgcatgaagagcagcctatatcaaaggttccagagcgtagccatcaagaacaataggtagrcatgtcataaggataagagctgttagaggtgagaagagtccctcaaagaaaattgtgaactaggtaataggaactcccccacccccgtgaacacttaaatacacacttgagcttgtaagaaattaacactcaatttaagtgtggcatagtggctcatgcctataattccagcatttagggaggccgaggagggaggattgcttgaagccaggagtttgagaccagcctgggcaacaaagtaagacccctgtctctacacacaaacaaatgaac

SEQ ID NO: 2635 - DNA, 438 bp, Homo sapiens
tccccagactgactccacctatgaggcagagtgagtggagggagacacagtttcccacaaactctgggaaacctctggcaagtctctgacctcagcctcttcatgtgtaaaatgggatctgtgtcttacaattccttccagttctaaatgggatgtagagtattgtgcttatctcaaactggggcctttgggctacagctggccctttgacatgtattgtttggtttrcacatttaaaaaaatggaatgagttgctgatttcacataaaatggatattttaccttcttttgaaaagtgggaagctctggctcccacacaatacttgctgctgagacacgggtgtctgcccatgcctttgaggctgtctggccattttgtttgtggaaatgctgacctggaagatatttcagtaaaagcacaggttccggagccaccca

SEQ ID NO: 2636 - DNA, 255 bp, Homo sapiens
tccccagactgactccacctatgaggcagagtgagtggagggagacacagtttcccacaaactctgggaaacctctggcaagtctctgacctcagcctcttcatgtgtaaaatgggatctgtgtcttacaattccttccagttctaaatgggatgtagagtattgtgcttatctcaaactggggcctttgggctacagctggccctttgacatgtattgtttggtttrcacatttaaaaaaatggaatgagttgc

SEQ ID NO: 2637 - DNA, 20 bp, Homo sapiens
ccagaatctaggccaggtgt

SEQ ID NO: 2638 - DNA, 19 bp, Homo sapiens
cccaacccagctcttcttt

SEQ ID NO: 2639 - DNA, 374 bp, Homo sapiens
ccagaatctaggccaggtgtggtggctcatgcctgcaatcccagcactttgggaggccaaggcaggaggactgcttgagatcaggagtttgaaattagcctgggcaacataaggagaccccatctttacaaaacaatgaagaattagctgggcttggtggcgtgtgcctattgttccagctacttgggaggctgaggcaggaggatcccttgaacccaggaggtgggggctacagtgagccatgatggcaccactacactccatccttggcaacagagtgagactctgtctcaaaacaacaacaacaacaacaacaaaaacaaagaccagaatctaaacagttgtctaaacagcaaaagaagagctgggttggg

SEQ ID NO: 2640 - DNA, 19 bp, Homo sapiens
ctgccttcgcctttctctt

SEQ ID NO: 2641 - DNA, 20 bp, Homo sapiens
tttcacactgacggctgcta

SEQ ID NO: 2642 - DNA, 260 bp, Homo sapiens
ctgccttcgcctttctcttccaagaatccagagtggctgaattggttcaaccctcataaccgataattctcctgcacttgaatcttactctctccagtctattctaccacacagaatgggacatggaatctctcaaagcccagctctgcccttctctgtctctctgcctccttgtctctctctctgtctctctctcttacttacacacacacacacacgcacactcacacacaccccatttagcagccgtcagtgtgaaa

SEQ ID NO: 2643 - DNA, 20 bp, Homo sapiens
ccatttcctccatccctcat

SEQ ID NO: 2644 - DNA, 20 bp, Homo sapiens
ggcaggaagactgcttgaac

SEQ ID NO: 2645 - DNA, 273 bp, Homo sapiens
ccatttcctccatccctcataggtaattattttaaaaagtgttatggttgatccttccataaaaaatacaaatatatatattcatagtctactcttctttgaaaacgtggtagcatactctgtgtgtgtgtgtgtgtgtgtgtgtgtatgtgtgtatataattttattattatttttaaggataggatctcactatgttgttcagtctgaagtacaggtgcaatcacagtgcactaaagtctcaaactcttgggttcaagcagtcttcctgcc

SEQ ID NO: 2646 - DNA, 20 bp, Homo sapiens
ccatttcctccatccctcat

SEQ ID NO: 2647 - DNA, 20 bp, Homo sapiens
ggcaggaagactgcttgaac

SEQ ID NO: 2648 - DNA, 273 bp, Homo sapiens; identical to SEQ ID NO: 2645

SEQ ID NO: 2649 - DNA, 20 bp, Homo sapiens
caaagaggcccagtgatgaa

SEQ ID NO: 2650 - DNA, 20 bp, Homo sapiens
actctgccttgcttgtaccg

SEQ ID NO: 2651 - DNA, 134 bp, Homo sapiens
caaagaggcccagtgatgaatgggaggggaaagcggaaggtggggaggagaaggagaaggaggaggaggaggaggaggaggaggaggaggaggaggtggaggaggtggcagtggcggtacaagcaaggcagagt

SEQ ID NO: 2652 - DNA, 20 bp, Homo sapiens
atagagcaagtggccgagag

SEQ ID NO: 2653 - DNA, 20 bp, Homo sapiens
gagtctgtggcttggctagg

SEQ ID NO: 2654 - DNA, 138 bp, Homo sapiens
atagagcaagtggccgagagcagagtggaagaggggcagggactggaagggcagaggcctgggagatgaactgtagggtgtgtgtgggtgttgcggactgcctgcctgcggcctagcccctagccaagccacagactc

SEQ ID NO: 2655 - DNA, 20 bp, Homo sapiens
tttcccatcaaaggaaggtt

SEQ ID NO: 2656 - DNA, 24 bp, Homo sapiens
gtacttaatacccagcttctcacc

SEQ ID NO: 2657 - DNA, 409 bp, Homo sapiens
tttcccatcaaaggaaggttaatggtaacctggatttaaaaagtggggtgagaccaggcctagtggctcactcctgtaatctcagcacattgggaggctgaggcaggcagattacttgaggccaggagtttgagaccagcctggccaacatggtgaaaccttgtctctactaaaaatacaaaaaaattagccagatgttgtggtgcacacctgtagttccagttactagggaggctgtggcagaagaatcacttgaacctgggagacagaggttgcagtgagctgagattgcgccactgcactctagcctgggcgacagagcgagactctgtctcgaaaacaaaacaaaacaacaacaacaacaaaaacaacaacaaaaaactggggtgagaagctgggtattaagtac

SEQ ID NO: 2658 - DNA, 20 bp, Homo sapiens
gaagtccaaccacccttgaa

SEQ ID NO: 2659 - DNA, 20 bp, Homo sapiens
gcatggtagcacacaccatt

SEQ ID NO: 2660 - DNA, 321 bp, Homo sapiens
gaagtccaaccacccttgaagcccctggctttttttttttaaagaaactttttgttttataatagttttagatttacaagaaattgtgaaaatattagagttcccagactccatacccactttctcctaatatatatatatatatatatatatatattttttttttttttttttttttttgagacagagtcttgctctgtcactcagaatggagtacagtggtgtgatctcagctcactgcaacctccacctcccgggctcaagcgatcctcccacctcagcttcctgagtagctgggactaatggtgtgtgctaccatgc

SEQ ID NO: 2661 - DNA, 2001 bp, Homo sapiens
actttctggaaggaagtcactatgtggagcccacgcttaaggagtgggagttatgttccctccccttgagggtgcaatatgtatataaattgtttggaattcctctgcatggaagatttgtctcttcctctcacatttatttattcaattatttatttatgtaagtacggattcctggctatttattttatacttcgggttattatccaatactactttattttgttgctcaatttgttccatctttgagcattgggagatctttcatttggctcctgtgtccctttgacaaacccccatcagtgtggtcatttggatgtttcggtagacatgagctatcaatttctttctagtctaagtcagtttagttcaaaggttttgtcacgtgtaaccaaaagattatcaacaaatctcgagagtctttaggttgcattatctgttgaaactttcagatgttgtccacatttttcttgtgtcaatgcagttgaatgaaaattttaccctggaaagcacagatcctccctggggctgcagtggtcactttgctgggcactgtatccggggacttgggatcgtgggcctgggtgcgattcaagggctagtcttatgatcttaggcaagtcacttaacctctgagctataaaaggggtacagagatgggaggggattaggtgacaccacgtcattgtgatgtgacccagacaccaagactgtacctctgatctgctgaaccagttgcaggtgagtttaatgaagcctccaaattacggttgccagataaaatataggacacccagttaactttgaatttcagataactaatgaaaaattttattataagtatgtctcaaatattacatggggatatacttacactaaaaaattatttgttgtttatctggaattcaaagttaactgggtgtcccgtatttttatttactaaacctggcaatgttaccccaaatggcctctcatttttaggtttctcagggcatacactccagaaaaggtgactctgccacttcaatttcagtgataaaggaacctgagccatgtagtgtcctgggaagaacaggactttgtggtcagagtctcatgaggtcaaatctctgctccatggctctgggaaacttgtttgatcattctgaggtcagtctccatcctctgttgtacaatgggttgataattcacagacgccatcacaacactttgcagggtctgacacctgggactcagtcaatggtggccactgctattgatgttactcttatttggacaaatgaacagaatgtcctgagagaggagatcgaaagccatgacaaggcagccccctcactcccacccagtccccttctctgagccggggagactgctaatgccagaagcagaggctaggggtgtggagggggtttggggtgctctgtgaggatctctctggggcctgggctttttgctcaagctcagtatctcatctgggatcctgttttctgagggcttaggattcctccagtggagctgggcctgaggttggaaggagaacctgtactgatagggtttggaatgggctagttgtgggagattaaagagaaaactagttggggtgggggagctgaccttactcttcacaagcagggcaggcaggtgcacaataatgatagctaaatttactgagttcttagtatgtgccaggcatagttttttgtaattttaatgtattacttcatttaatcctcacaactccccattttataggtggggaaattgaggcgcagagggactaggaaacctgcccaaggtcgcacagtgagtaagtgggacagcctggcagctgtgtcctagtcacatgctcagcacattgtgtatcttgtttcatttagttctcacaagagccttctgaggtcagcgtgattctatcttcattgtgtagctgagggcactgagggttatacaatttgcccaaggccataatttacaggggccatgattcaaatgtgaatttcc

SEQ ID NO: 2662 - DNA, 20 bp, Homo sapiens
gaagccacgtgaggattcta

SEQ ID NO: 2663 - DNA, 22 bp, Homo sapiens
gatttgtaaagcatgtggcaag

SEQ ID NO: 2664 - DNA, 411 bp, Homo sapiens
gaagccacgtgaggattctatttttaaaaatggccttgtaattataatagtggggtaaaaaccaccaccaccacccaagcaaacaggaaaacaacctgaatgtccaacagtgggggaaccagttaaatcaattatggtacaaacccatgatggcatatttggcagttaagaatctcacattttcagagactcttagcatgggataatgcctccagatataactaaaagcaggatataaaactgcataacaacctgatcccaatcgaaaggtaattttgtatatgacttcttatacagagaaaacgactagaagaaaatagaaagttgatggtggttatctccagcaaaattaaaggcaattaaaattttctgaattatcctatcatgtacttgccacatgctttacaaatc

SEQ ID NO: 2665 - DNA, 20 bp, Homo sapiens
gcacagctagagcaaagcag

SEQ ID NO: 2666 - DNA, 20 bp, Homo sapiens
ggccaaacgtcaattagcag

SEQ ID NO: 2667 - DNA, 381 bp, Homo sapiens
gcacagctagagcaaagcagagaaaggagggggtgaaggtggggtgggggctgggtggaagggaagggttggggaacctttcaaaaatggaaaccagatgagccgttcaaagaggagcaaattctccacggcgcgctcctttgttgcgagcgtgtgaggcggcggcagctgcgtgcctcgccccccagcccacagcccgatgaggcggacacggataactgcattagatgcactcagctcttttcaataaaacgcccttgttggaggcacaatagggggaacagggcagcaaccccaggccgggccgggggcgccctgccctcctcccggagagcgcagagcgcactcatttttccgggctctgctaattgacgtttggcc

SEQ ID NO: 2668 - DNA, 20 bp, Homo sapiens
tgaccaccagacacatggat

SEQ ID NO: 2669 - DNA, 20 bp, Homo sapiens
ggcttccctttcagtgtcaa

SEQ ID NO: 2670 - DNA, 234 bp, Homo sapiens
tgaccaccagacacatggataccacaagttgactgaaacatctgaaagaaaaggagcccctcccctccccctcaagagcccgaccagcaaaaccacacaccaaaagcggagacaaagtttttctcttgcttccaactttgtcttttaggatccagctgcactttgctgggcaccataaataactctgcaattacattaattggttgcatatttgttgacactgaaagggaagcc

SEQ ID NO: 2671 - DNA, 20 bp, Homo sapiens
tccaaaggcaaaggagaaga

SEQ ID NO: 2672 - DNA, 20 bp, Homo sapiens
gaacaatctgcagggagcac

SEQ ID NO: 2673 - DNA, 379 bp, Homo sapiens
tccaaaggcaaaggagaagagtaagaagctggggcccgatgccatgcaattaacccccaagtttgcttcaaaacttggtgtaagagaaaaactgaggatccccaagcactaaaaagtatccccttccgaccccgagaaaacgggtctccagggacagaaaaggtgtgctccggtgggagggacagcctcgttccaggcagcgcttcctccctccctcccgcgcatggtccacgctcaactcattcatcgacagtattcagggctccctgagccgacgcctggttctgtgccagctgctgggtatccagtctgacgttctggtgtgggtgagacaggcaatgaaaagtcagcaaagaaacgtgctccctgcagattgttc

SEQ ID NO: 2674 - DNA, 598 bp, Homo sapiens
gctggtgaaggagtcctctaaggtggaaggcagggcctgggtgctggtgagtctgatcttgctgctgctgtgtgtatggtaacacctccatggagggcacctacttccccagccacgcacagtgtggtggggctgacccttagaactgagttctggtattccagctctccaagctctggttccatcatgcagccaatcccagggtgcaagcagctccaggaggactgcaagtcagaatgtccccagctcggccactgcgcaggcccagaaccagggtccttcttcctytccagggatcaaattcttctaaaggaggcagacagtcttaaaaagctgcttactatacaaaaacgttgttatacccttctcccaggacacaaaggcctgcttactgacccttcacttacaaactgatggatttttccaaaacaaagaagacctgctttgaggttttgttttttccttctgtctataccctaaggtagctggaaaattatcttgctgaagattaaaaacacaagtttaaactctgatagggctctctactgtaacccatgattgatttcatttagtactctccgcaactttgggaagtctt

SEQ ID NO: 2675 - DNA, 598 bp, Homo sapiens; identical to SEQ ID NO: 2674

SEQ ID NO: 2676 - DNA, 20 bp, Homo sapiens
ttgccatctaccctacttgc

SEQ ID NO: 2677 - DNA, 20 bp, Homo sapiens
catgataaagcagccacagc

SEQ ID NO: 2678 - DNA, 144 bp, Homo sapiens
ttgccatctaccctacttgctgtttggtttgcttgcatctgcctactttgctctgctctgagttgatggtgtctatggtgaggtctcctgataaacagggatagccctaccaatgatgtttgaagctgtggctgctttatcatg

SEQ ID NO: 2679 - DNA, 20 bp, Homo sapiens
aggaggtgcatcaaagtgct

SEQ ID NO: 2680 - DNA, 25 bp, Homo sapiens
tgccagtttcaaatatatctgtgtt

SEQ ID NO: 2681 - DNA, 427 bp, Homo sapiens
aggaggtgcatcaaagtgcttactaaaaatggatgaaaagattctattctgaagatgagatgaggaaagaatcctctggattatatagaaacacagatatatatatatatatttctttttttctagatggagtctcgctctgttgcccaggctggagggcagtggtatgatcttgactcactgcaacctccatctcccaagcaattctcctgcatcagcctcccgagtagctgggattacaggcatacaccactgcacccggctaatttttctatttttagtggagatgaggttttgccatgttggccagtctggtctcaaactcctggcctcaagtgatctgcccacatcggactgtcaaagtgctgggattacaggggtgagccaccgcgcctggccagaaacacagatatatttgaaactggca

SEQ ID NO: 2682 - DNA, 20 bp, Homo sapiens
atgcctgagttccaatcctg

SEQ ID NO: 2683 - DNA, 20 bp, Homo sapiens
gagaagtcgcaagggacaag

SEQ ID NO: 2684 - DNA, 181 bp, Homo sapiens
atgcctgagttccaatcctggatcatacggaccatagggctgggagatgtgtgtgtgtgtgtgtgtgtgtgtgtgtgtgtgtgtgtgtgtgtgtgtgtgtgtagggggttaccgtacccaagaggccctccccagcggccaatgcccagcacacgcttcaccttgtcccttgcgacttctc

SEQ ID NO: 2685 - DNA, 22 bp, Homo sapiens
gggacctggtagtagacagagg

SEQ ID NO: 2686 - DNA, 20 bp, Homo sapiens
ctctcccattggctttcacc

SEQ ID NO: 2687 - DNA, 22 bp, Homo sapiens
gacatctctcttccccctcctc

SEQ ID NO: 2688 - DNA, 19 bp, Homo sapiens
ctcttggcccgtcaatcag

SEQ ID NO: 2689 - DNA, 541 bp, Homo sapiens
gacatctctcttccccctcctccttccctcagggatgaggggggaagcaacctcccctccctccgcaggtgggcgcaaagctgggggcgcacttaccctggggcctgtggtgcggtggccgcgagcaggggacagctgcaccaacaccagcagcaagtggggcgtgagcaggcgggcgcagcgcgcgggcagcatggtgccagccaggctgggcagccggcagcgagcggggttcgcgggctccgcggggcgcacagcgcgcctcccttccttccttcgctcggggccctcgcggcggcggggagcgggccgtggtcctgcggcgggggctcgcagaggctgcggtcaggggacacagtcatgaaccgcgcaggaggggagctggagcgcgagcgtgtgctctgcgcgcggcgctagctccgctcggcggggcccaggcggcagcaggttggacgcctgagcccgggccatgggaattcccgttataaacccccgggaggggcggggcggagcacggcgggcctgattgacgggccaagag

SEQ ID NO: 2690 - DNA, 20 bp, Homo sapiens
aggctggtgtatgtccaagc

SEQ ID NO: 2691 - DNA, 20 bp, Homo sapiens
tcgagacagcaccttctcct

SEQ ID NO: 2692 - DNA, 163 bp, Homo sapiens
aggctggtgtatgtccaagctgcttcacactctctctctccttctttctttttttccctctttctctctctcactcaaatacatacatgcacaaacacacacacacatgtgcacacacatcttggtgtgtttagaaagtaccaaggagaaggtgctgtctcga

SEQ ID NO: 2693 - DNA, 781 bp, Homo sapiens
ggaatggtggggtgggctgtgtggtgagaagggtgatggacgtggatggtcagagcccggagagggggcttccctcttactgcatgaccagttgcttcatctattaaggggattaaatgattttccagggtcctcccagtgcagatgttccaagagttggagctgacaggaaaaaggaaatatagaaagagtttggaaaatttcagaatagaatagataggccatgtgaagatgattccagaaagcccaaaataaggataataggcccgcagttgaaagattcccatagatacctacattttacagatgtttaaggactatccccagtgcacttggccagctagtggcagagccagagccagcttctagatatgtccctttattgctctgtgcatgccttttcctttcaaagatgccctgkaacacttggaaaagtggcacaattccagctatggggaggaaatagcttgaatttttgtagaggattgtgtttctaagttggctttggccaattcaccaatttccagtggttgggaaaggtgaccaaaacctcagaacatgtggaatcttccccgtccttgccacctgactatgcatgcatttcatagcattctcatttcctgaaaaggggtgagtttctggtttccgccagtgtcgaaggtttcagttaggaaatgtgaagtagagctgatagaacaagtagccagcgattctgtttgaagaagtaaaggtagatcttggtgtaggactcttgatgctggttaatagcaatgagatcaat

SEQ ID NO: 2694 - DNA, 481 bp, Homo sapiens
tacagatgtttaaggactatccccagtgcacttggccagctagtggcagagccagagccagcttctagatatgtccctttattgctctgtgcatgccttttcctttcaaagatgccctgkaacacttggaaaagtggcacaattccagctatggggaggaaatagcttgaatttttgtagaggattgtgtttctaagttggctttggccaattcaccaatttccagtggttgggaaaggtgaccaaaacctcagaacatgtggaatcttccccgtccttgccacctgactatgcatgcatttcatagcattctcatttcctgaaaaggggtgagtttctggtttccgccagtgtcgaaggtttcagttaggaaatgtgaagtagagctgatagaacaagtagccagcgattctgtttgaagaagtaaaggtagatcttggtgtaggactcttgatgctggttaatagcaatgagatcaatg

SEQ ID NO: 2695 - DNA, 19 bp, Homo sapiens
cgtctgagaagtgaggagc

SEQ ID NO: 2696 - DNA, 20 bp, Homo sapiens
attgatcattcttgggtgtt

SEQ ID NO: 2697 - DNA, 382 bp, Homo sapiens
ctattgcactgcctctactacttttcttagtctcaagtagctgatgcttcacctctcctgggcattttcaggacagatcagtaaccccagaagtcacatgtgtgagagcctatgaagaggagctacaacaaggctgaggaatgccaagtgctaaaccccataagtgaccagtagagaaggayctgttgaaaggtcttcccttaagggcatgtgctggagaaatccaccccttcggagacagtggcaccattgttcagataagttacacaaacatgagcaagaactagatcccaccagcaagagaattcacacatgcatgcatgcttggcaagtgaagctccagatcaaggcagctggtttcactcataggtgggaagaagtt

SEQ ID NO: 2698 - DNA, 255 bp, Homo sapiens
ctattgcactgcctctactacttttcttagtctcaagtagctgatgcttcacctctcctgggcattttcaggacagatcagtaaccccagaagtcacatgtgtgagagcctatgaagaggagctacaacaaggctgaggaatgccaagtgctaaaccccataagtgaccagtagagaaggayctgttgaaaggtcttcccttaagggcatgtgctggagaaatccaccccttcggagacagtggcaccattgttc

SEQ ID NO: 2699 - DNA, 20 bp, Homo sapiens
gggctcaaaacagtgtaggg

SEQ ID NO: 2700 - DNA, 20 bp, Homo sapiens
ataaagtgctgggaggcaga

SEQ ID NO: 2701 - DNA, 191 bp, Homo sapiens
gggctcaaaacagtgtaggggagttgtttttcagttttgtttctctttccttgcctcttttcttttaatcttaggttctggggtgtgggggtgtgtgtgtgtgagacaagtctatttggaagaactgtattctcccaattgtttctttgaaatgtccctctcttcttcttctctgcctcccagcactttat

SEQ ID NO: 2702 - DNA, 22 bp, Homo sapiens
tggatgtttcagggaaccttag

SEQ ID NO: 2703 - DNA, 20 bp, Homo sapiens
agggccttctcctgacactc

SEQ ID NO: 2704 - DNA, 263 bp, Homo sapiens
tggatgtttcagggaaccttagcattagggctgccagataaaatacagggcacctagttaaattcgaatttcagataaacaatgaattggcgtgtgtgtgtgtgtgtgcgtgtgtgtgtgttccaaacagtacatgggacacacttatactaaacaatatattccttgcttttctaaaattcagagtaactagtcattgtgtatttttatttggtaaatctgaccaacctacttggaatacatgagtgtcaggagaaggccct

SEQ ID NO: 2705 - DNA, 20 bp, Homo sapiens
ccttaacacccacacgatca

SEQ ID NO: 2706 - DNA, 20 bp, Homo sapiens
atctctggtcactgggcatc

SEQ ID NO: 2707 - DNA, 138 bp, Homo sapiens
ccttaacacccacacgatcagaagtgggagacaccagtaggaaggaaacaaacaaacaaacaaacaaacaaacacaaagctgcctaggtctggtgaagtagccattatcatgcgagaagatgcccagtgaccagagat

SEQ ID NO: 2708 - DNA, 20 bp, Homo sapiens
ccattcatgcttctggtgtg

SEQ ID NO: 2709 - DNA, 20 bp, Homo sapiens
aggaggaccaatgtgttgga

SEQ ID NO: 2710 - DNA, 408 bp, Homo sapiens
ccattcatgcttctggtgtgctggaagactagtttacgtattcttttttctaatttattttattcattcattcattcattcattcattcattcattctgttgcccaggctggagtgcaattgcatgatcttggctcgctgcaacctccgcctcctgggttcaagtgattctcctgcttcagcctcccaggtagctggaattatagccgcccaccaccacgcccggctaattttttgtatttttagtaaagatggggtttcaccatgttggccaggctggtctccaactcctgacctcaggtgatccacccgcttcagcctcccaaagtgctgggattgcaggcttgagccaccgcgcccggccagtttacacattctgtcctcaaacttccaacacattggtcctcct

SEQ ID NO: 2711 - DNA, 20 bp, Homo sapiens
tcacatacaacccaggcaaa

SEQ ID NO: 2712 - DNA, 20 bp, Homo sapiens
aactccggagaagcaggaat

SEQ ID NO: 2713 - DNA, 136 bp, Homo sapiens
tcacatacaacccaggcaaatggtgcaggcagaaggaaatagcctctttctatttatgtgggtaatggagaagtggtgatcgtgggtttttttgtttgtttgtttgtttgtttttgattcctgcttctccggagtt

SEQ ID NO: 2714 - DNA, 20 bp, Homo sapiens
tgcctcgacattgtatcagc

SEQ ID NO: 2715 - DNA, 21 bp, Homo sapiens
gagaccctgctctaggaccac

SEQ ID NO: 2716 - DNA, 227 bp, Homo sapiens
tgcctcgacattgtatcagcttatggggacagagccctagtgttgggtgtgtatggtgtgtgtgtgtggtgtgtgtgtagggaaaaggaggggaaggatgaacaaatgagataactgaaaaccaacagaagttaacctgtgactttgtgcatcccatctgttgtcacatcaactcttatcacctgttgacttctcttctcccaggggtggtcctagagcagggtctc

SEQ ID NO: 2717 - DNA, 20 bp, Homo sapiens
gctccctgttgtagccaaat

SEQ ID NO: 2718 - DNA, 20 bp, Homo sapiens
acggaaccaccacataagga

SEQ ID NO: 2719 - DNA, 345 bp, Homo sapiens
gctccctgttgtagccaaatggcacataggctccaaagagccataattgggtgtggaatggtgaaaagtatgttggagtcagcagacctcattgaaagccatgttttagcacttctttacatggtgaccttgaggaagtcacttgacctctctgaacctcagttaatttgcccaggattgcttataggttgctgtgaaaacctggatgtggtgatgatgatgatgatgacaacaatggttcacattaactgagtactcaacccgtgccaggcccaattctaaattcttcatgtgtcttcactcgcacttcactttgcttagaacatccttatgtggtggttccgt

SEQ ID NO: 2720 - DNA, 401 bp, Homo sapiens
cccaactcttaggtggtgttgatgctgggatattggacagggaaagatacctttctggagaaggaatgaccatctggaagtctctgtacactggagtgaaactctctggagggtcctgatccctcaggaaggtctcttccaggagctgggagtctccccggggttgcaagcttgcaagctgcataggaagagaccttcttgaggtggcatcttatgtctttatagtgactgtccagcatctgccacatcagagatccctggaggctctatgctcrcccattatggaaggaagagggaggaggcaccccatttgctgaagcctttcccttccattccctactccatctgcctcccccaaacaatttcagtctgagggctgtggaagagtcctaataaacata

SEQ ID NO: 2721 - DNA, 301 bp, Homo sapiens
cccaactcttaggtggtgttgatgctgggatattggacagggaaagatacctttctggagaaggaatgaccatctggaagtctctgtacactggagtgaaactctctggagggtcctgatccctcaggaaggtctcttccaggagctgggagtctccccggggttgcaagcttgcaagctgcataggaagagaccttcttgaggtggcatcttatgtctttatagtgactgtccagcatctgccacatcagagatccctggaggctctatgctcrcccattatggaaggaagagggaggag

SEQ ID NO: 2722 - DNA, 401 bp, Homo sapiens
gggagcggggcactgacctcaccagggccaaagccatggagcatccgcctgttctggcagtccaaagagtggctttgccatcccgttcctcagaacccgagctgttcctcaaccctccaacaggtgcgtggtgggttgtatggtgaaggcatgctcaagggaacgggaacacccttcttcaccactaccctctgtgtttcrcaaaacacgagtccaccagcggggtgctttgttttgcctgcagatgtgtgaagccacaggcacagcccctgaacaggaacagcttcctgaagggctcaggagggggtcagtggctttatagtaaacttgctgttttgctgtagaatgcacgactatgttacaggtgatgagcttcctctgctgcgctggggccttccggg

SEQ ID NO: 2723 - DNA, 255 bp, Homo sapiens
gggagcggggcactgacctcaccagggccaaagccatggagcatccgcctgttctggcagtccaaagagtggctttgccatcccgttcctcagaacccgagctgttcctcaaccctccaacaggtgcgtggtgggttgtatggtgaaggcatgctcaagggaacgggaacacccttcttcaccactaccctctgtgtttcrcaaaacacgagtccaccagcggggtgctttgttttgcctgcagatgtgtgaagc

SEQ ID NO: 2724 - DNA, 27 bp, Homo sapiens
aaagaaaggaacaaatacctttaatca

SEQ ID NO: 2725 - DNA, 20 bp, Homo sapiens
acatagggcgtaacacagca

SEQ ID NO: 2726 - DNA, 215 bp, Homo sapiens
aaagaaaggaacaaatacctttaatcactatacatttgagagctttaaggtattgttggtagttggacaaagaatatttcttttcacagtaagtgacagaaaaaagagctacttcttcatgatatattttaggtaaggtttgatattcattcattcattcctcaaacatatactgaacaaacttttttggtaaggtgctgtgttacgccctatgt

SEQ ID NO: 2727 - DNA, 25 bp, Homo sapiens
tgatatctggttaagtgtttgatcc

SEQ ID NO: 2728 - DNA, 21 bp, Homo sapiens
ggagtgaaggaagaaggaagg

SEQ ID NO: 2729 - DNA, 287 bp, Homo sapiens
tgatatctggttaagtgtttgatccaccccccatccctcttgcttctgcttttgccatgtgacatgcaagctcctgcttcaccttctgccctgagtaaaagctccctgaggcctccccagaagcagagcaaatgccagtgttatgcttcctgtacagcctacagaaccatgagcaattaaatctcttttctttataaattacccagtctcaggccggccttccttccttccttccttccttccttccttccttccttccctccctcccttccttcttccttcactcc

SEQ ID NO: 2730 - DNA, 22 bp, Homo sapiens
gggtggagagataggaaagcaa

SEQ ID NO: 2731 - DNA, 22 bp, Homo sapiens
gaggatgccttccttggttaga

SEQ ID NO: 2732 - DNA, 471 bp, Homo sapiens
gggtggagagataggaaagcaaagtgagtggacagacttactccaagcttccctgttgcaaatgcatagtgagggagctggggtgcccaggaacctctccttggctgggcaggggtgcacacactcacctttgcatctacctcgatgcaccacgcccagggtcgggtctcggcacttggctcgctggtactcacacatggactcgtaggacctgccatcagaggcacagatgggtttgggttgagtcctggagcagtggaggttgcactgtgggtcacggtcacttattagaaactaggttggaaaaaagtgaaagggtacagaggttacttttgcaagaaaagtaggggcgagtccatgacttacagtacttgtttgcctttagaaagtaagtccctaataaacccaaataaaaccctaaaggtgaagggaacggagcagccacaaagtctaaccaaggaaggcatcctc

SEQ ID NO: 2733 - DNA, 18 bp, Homo sapiens
acctgccatcagaggcac

SEQ ID NO: 2734 - DNA, 21 bp, Homo sapiens
actgtaagtcatggactcgcc

SEQ ID NO: 2735 - DNA, 1303 bp, Homo sapiens
agagactatagggagtgctgtaagactgtggcaaactggacaacaggctcccctttaaagcggtagctgttatgcaggtctagccatgtgttgctttgtaggaacacagacctaatgttaccagaccttccaattttggaaaagaaggacaaaaagccagattttttttctttgaatctcccaatttttaaatgttatcccaaatgttttttgctgtttttaaacaggcaaacagaccaaacaaaacacatctgttggccaacaatttggaatcactattcaggagccagcaataatgtcttgcggttttaagcatctccataaaaagaaaaaggaaagcgctggccagatagcagcacatctctttaagccctagcctgggggcagtgtttgaaagatagaaaaatgctcattccttcaggtagaccaggctttcttcccttggccctggtggaaggggtggagagataggaaagcaaagtgagtggacagacttactccaagcttccctgttgcaaatgcatagtgagggagctggggtgcccaggaacctctccttggctgggcaggggtgcacacactcacctttgcatctacctcgatgcaccacgcccagggtcgggtctcggcacttggctcgctggtactcacacatggactcgtaggacctgccatcagaggcacagatgggtttgggttgagtcctggagcagtggaggttgcaytgtgggtcacggtcacttattagaaactaggttggaaaaaagtgaaagggtacagaggttacttttgcaagaaaagtaggggcgagtccatgacttacagtacttgtttgcctttagaaagtaagtccctaataaacccaaataaaaccctaaaggtgaagggaacggagcagccacaaagtctaaccaaggaaggcatcctctatgcatcataagaacaataatgtctaacaattactgaccattaacaggcattgtgccaagtaattcacatccaggatctcagtcctcacaacaaccctatgaaatagaaactctattctgtagacaaggaaactgaagcccagagacgtaacttgcccagtgtcacatagctataagcagtggaggctgaattagaacctaaatctgtcagaagtaaaatcaaagctttatcctctaggatgtccagcctcttcatccatgcagatggccatgcagcctctatttgggtgtatcctcaaatcaggaatataccataaatctccaaattccatctcgggaaagttttatttattagatcgtagtgagctccaaat

SEQ ID NO: 2736 - DNA, 22 bp, Homo sapiens
gcgtcttttcaggacctactgc

SEQ ID NO: 2737 - DNA, 22 bp, Homo sapiens
ttttagggttggacaagccagt

SEQ ID NO: 2738 - DNA, 460 bp, Homo sapiens
gcgtcttttcaggacctactgccagttggcaagaggtggcatggagggacggggagggccagagagggggaaggcagcacagaggggagttgaagagccactcactcaactgtttcccagaaagtgaaggcgccaagcagccctcgcgctctcgggacacctcccctctgcctcggtccaggaaagagcccaagaggattgtccgaggcctcacctgggtaaaggagccatcctcgccacactctgggacaaacacagcttcctgaggcttcttggcttgctccagggcttgagcccgctccaggcgacacttgctctggccagcatctgaaagaggagaggagcagatttcatatttcacttggattcgacactggggccgagggacaaaatggctgagaaaaccactccacctgtgcgggagcccacacacaactaactggcttgtccaaccctaaaa

SEQ ID NO: 2739 - DNA, 20 bp, Homo sapiens
gtccttgaacgaagcagagc

SEQ ID NO: 2740 - DNA, 20 bp, Homo sapiens
tgagaggtaggactgcctga

SEQ ID NO: 2741 - DNA, 140 bp, Homo sapiens
gtccttgaacgaagcagagccctctttgagcacaaagtgtactatggttcttggagtgtgtgagtgtgtgtgtgtgtatacacatacaggtatgcatatactcagattttaaaacctaagtcaggcagtcctacctctca

SEQ ID NO: 2742 - DNA, 20 bp, Homo sapiens
cttgtgtgatcctgggtgtg

SEQ ID NO: 2743 - DNA, 20 bp, Homo sapiens
cagacacatggcagtgctta

SEQ ID NO: 2744 - DNA, 274 bp, Homo sapiens
cttgtgtgatcctgggtgtgttggttataggaatggctgacccctgccctcctgattctgaagtgttggctacctcgtgacagacagcccactggccagcttttgttttggtgaggccaggccagaccaggtggtgtttactgagggaaaggaacttccagattagtccaggctaaattgctaaacgagagagtccctgaagttcagcaagagttatgtagatagtcaagaaccccctcatttgtttgacatgctaagcactgccatgtgtctg

SEQ ID NO: 2745 - DNA, 20 bp, Homo sapiens
cctttctccaacctccatca

SEQ ID NO: 2746 - DNA, 19 bp, Homo sapiens
gggatgcgtgcatatcaat

SEQ ID NO: 2747 - DNA, 744 bp, Homo sapiens
  misc_feature 245: n = A,T,C or G
gctgaaggctagctcactctggtgggcagccagacggccagacagcgggcccatcccagctacagtgattgaaatggatgtgcttttcccgctgatcaaagacactgcaataacttcacaaaataaggctgcctctttgagtatgcttcagtcacattgactggctgccaaaatgccgggagatgaatgctttctcctttctccaacctccatcacttagctgggcttttttttttttttttttnctcctaagaccaaaacccagagataaactacattgctttaatattctttagaatattgatatgcacgcatcccggtattaacatattttagccctgggaattattacacagtaaccctctcttgaagtttatggggggagtgatggcactctaatgggattggatttgtctggcatgggacacagcttgagaccacatgactgacttggctttaatgggcttcatgtgggactcgctggcctctgttctttccctttgttttcccttgtcctcttccctccctacctccaaccccaactcacacacaggagtggttcagctttcttctacagcagcgacactaaagctgtacattagaccatgttagacttttaaaggtcttgaaacctaggccatatcccagaccattaaatcaatatctgggaatgggacacagacattgtgttttttcgagctccccaggcgatgccaatgtttgatcaaagtttcaaaccacttt

SEQ ID NO: 2748 - DNA, 2001 bp, Homo sapiens
gctttaatattctttagaatattgatatgcacgcatcccggtattaacatattttagccctgggaattattacacagtaaccctctcttgaagtttatggggggagtgatggcactctaatgggattggatttgtctggcatgggacacagcttgagaccacatgactgacttggctttaatgggcttcatgtgggactcgctggcctctgttctttccctttgttttcccttgtcctcttccctccctacctccaaccccaactcacacacaggagtggttcagctttcttctacagcagcgacactaaagctgtacattagaccatgttagacttttaaaggtcttgaaacctaggccatatcccagaccattaaatcaatatctgggaatgggacacagacattgtgttttttcgagctccccaggcgatgccaatgtttgatcaaagtttcaaaccacttttgtatggacttcatcactctgtttctcgattgcatccttgagacgtggaatttagcctctttggtgacatgttgaataagctcaggagctataggctttgtcctttgctatggtcttatctgttttctgttctgggtatctggaacacaactcctgacatctgttctatcaagtcctctgccaagcagttgtctggtgcccaagctgattaactgaaatctcagctgcagtggaagggtgttgggctgtcaccatcaggctgtgttggctggagcttggcaagtgtgtgcatcactgaatgacaatgatgcccactttttattgagtgctatcaggtgctaggccctgtgttttacacccattaatctttactacaaccttttgagagttattaatacgcttatgtataaagaaaaattgagtttcagtggggttgaatagctgacttgaggtccctaagcttaagacaatttgtactcaagcctgcctaatattgagagcctaagacaagttgtactcaagcctgcctaatatccaaggctgtgctcttaacttttttgggctacagaagtggccttgatacatatgtattccatttctatcaccattgttgttgcagaagttctctttctaatgctgttgaccaatcaatgaaacaaacattttaaaaaacacaatctttagattatggaaattaaaaaaagatacaaaaaagtagacataatagtataatgaacatatacccatcacccagcttcaacaatgattaagaaatggccagttctgtttcatctttacctcatttccatctcctgcccccaaactggattgcttcaaagcaaatccccacgcacagtatcttttcatcccagatatttttgagctctgctatattgtgggctgtgtgctggttgctagggaggattcaaaaaaatgtcatgacctctgccttcaaggagtttacacgcagaaaagagattaagacatatgataaagtaactatataaaagacaatatacaaacaataatatttcgaaagctcatttataagtcagttatttggaatcctgaatgccttttattgttaagaaaatatatacaaattttaaatttttggacacaaataccttaaacaaaactaaaagcaaaactgagcatggtggcacaagcctgtagtcccagctaattgggaggctgaggcaggaggattgcttgagtccaggagttcaaggctatattgctctatgattgcacctgtgaatagccactccactccagcctggataacatagtgagaccctgtttctaaaaagagaaaaactaaactaaaagcaaacaacacacattagccttaacaacaaagagctaatcttatgtaaagaactcttacaattcagaaagaaaaagatcctagtgaaaatgtgggcaagagatagcaaaaaaccagccatatgataataatagtcaataagtgaatctgaatgatgttatcttcttttgtcattttagaaatacaaataaaaatgatgatgaatg

SEQ ID NO: 2749 - DNA, 27 bp, Homo sapiens
agctcatttataagtcagttatttgga

SEQ ID NO: 2750 - DNA, 24 bp, Homo sapiens
agctctttgttgttaaggctaatg

SEQ ID NO: 2751 - DNA, 330 bp, Homo sapiens
agctcatttataagtcagttatttggaatcctgaatgccttttattgttaagaaaatatatacaaattttaaatttttggacacaaataccttaaacaaaactaaaagcaaaactgagcatggtggcacaagcctgtagtcccagctaattgggaggctgaggcaggaggattgcttgagtccaggagttcaaggctatattgctctatgattgcacctgtgaatagccactccactccagcctggataacatagtgagaccctgtttctaaaaagagaaaaactaaactaaaagcaaacaacacacattagccttaacaacaaagagct

SEQ ID NO: 2752 - DNA, 19 bp, Homo sapiens
ctgtggacaatgccagctt

SEQ ID NO: 2753 - DNA, 20 bp, Homo sapiens
agtttgccaacctctgaacg

SEQ ID NO: 2754 - DNA, 675 bp, Homo sapiens
  misc_feature 233: n = A,T,C or G
tccttttttgttatatgctcaaaaaacatattattattacagtgtgaacatctactgtgtccagagcatctcactacttgttttacatgtgtttttcagtgaattgcttttgttccaaacaaccagttaatgtacagtgataatttatacaaaatgtcttctatttagcacataattgttgcttagcagatgttagttttcttcatctttaggttcttggtttgctcaactgnggaagagttgaactcgttcagaggttggcaaactgtggtctgtggaccggccacctgtttttatttattctttaaaataataactgtattgacatataatttgtgcatcataaaagttaccattttaaaatatgctattgagtggttattagtaaattcacagttatgcaaccatcatcattatctaataccagaacatttttgtcacccgagaagaaatcttgtacgcattagcattcacttcccattacctctctcctcagtccttggcaaccactaatctactttctatttctatgatttgcttattctggacatttcatacaaatggaataataatatgtggtccttctgcctggcttagtttaatcagcataatgttttcaaggctcagccttgttgtagcatgaatcagtacttcattcctttttattgtcaagca

SEQ ID NO: 2755 - DNA, 19 bp, Homo sapiens
agtgagctctgggcggtat

SEQ ID NO: 2756 - DNA, 20 bp, Homo sapiens
agtgactgaagcctcccatt

SEQ ID NO: 2757 - DNA, 145 bp, Homo sapiens
agtgagctctgggcggtatctgcagctgctcttctgcaatgcagtgtgcttgggagggagggagggaaagatggaagcctcctgctctggctttcctgctgtctgtgggagaggagaggctcagtaatgggaggcttcagtcact

SEQ ID NO: 2758 - DNA, 19 bp, Homo sapiens
agtgagctctgggcggtat

SEQ ID NO: 2759 - DNA, 20 bp, Homo sapiens
agtgactgaagcctcccatt

SEQ ID NO: 2760 - DNA, 145 bp, Homo sapiens; identical to SEQ ID NO: 2757

SEQ ID NO: 2761 - DNA, 20 bp, Homo sapiens
tagccaggtgtggtggtaca

SEQ ID NO: 2762 - DNA, 20 bp, Homo sapiens
atctggctctcaggtatccc

SEQ ID NO: 2763 - DNA, 386 bp, Homo sapiens
  misc_feature 5, 6, 12, 77, 78, 86, 284, 375, 377, 379: n = A,T,C or G
ccatnngctctnaaagccgaggtgggtgaatcacctgaggtcaggagatcaagaccagcctggctaacatggtgaanncccatctncactaaaaacacacaaaaaattagccaggtgtggtggtacatgcctgtagtcccagctacttgggaggctcaggcaggagaatcgcttgaacccgggaggtggagattgcagtgagccgagttggcgccactgcactccagcctgggtgacagagcaagactctcaaataataataataataataataataataaaangatgaccaaagggatacctgagagccagatccaaacctttgtctgtgaatgataataagtcttttaagtgtagtcccacagagctgacccngngntcactga

SEQ ID NO: 2764 - DNA, 22 bp, Homo sapiens
tgtcatgccttatcatttgctg

SEQ ID NO: 2765 - DNA, 22 bp, Homo sapiens
caaccatgtacccagtgctgtt

SEQ ID NO: 2766 - DNA, 466 bp, Homo sapiens
tgtcatgccttatcatttgctgacttccgagcaagcatgttagagtagaatcctccctgatctagaaaaaggttcatcaccaccatcaaccttctaaaggttctcccacaagatgcaggagaccaaccaacgggtctctctccaacccttttcattcttcccgcccctccctacggtacctgaacatacaggagttttattctgcacagaagagccactgatgggcttcccatccggggtgacacaccagcagtacccagtgtaagtatggcactgcacctgttcagggaagtgaaaagggaagaaaaccataagtctcggtcacaatatcaagactcatctccaacccctttcaaagcatcacccatacggtgaaagagcatcttccacctctcatccccacatctgtctccagagtgtctctcatgggtggtccagtcagtgaacagcactgggtacatggttg

SEQ ID NO: 2767 - DNA, 22 bp, Homo sapiens
ttcccagctctgggctctatac

SEQ ID NO: 2768 - DNA, 23 bp, Homo sapiens
tgttaaacaaaccccactcaaca

SEQ ID NO: 2769 - DNA, 475 bp, Homo sapiens
ttcccagctctgggctctatactcagtcacctcccttgggaaatctgggagcttggtgtccatcactgtatgagccttacttacctcgggtgcttcagagaggaaacatggaataagaatggagaagatgttctgcgggacaccttaggctttcaccccaggctccttctatctcatctaagaaatcctgcttggaccacctttggaagcaaacatttagataaagcataaaactccactcacctttccttcctgagttaccctggctcaagggcttgtcggtgactgaaccttgggtgagaagggaaacaaaaacatagccactcagaatgcattgtggttggtttctttctaagagttggcaaaacctgatgttatgagcatatggtcatgtatatatgtattgtatacacatctaaggatattatatacaatgttagtacatatacacatgttgagtggggtttgtttaaca

SEQ ID NO: 2770 - DNA, 568 bp, Homo sapiens
gcatgcctgtagtcccagctacctgggaggctgaggtgggagaattgcttgagcccaggagtttgaggcaagcctaggcaacatagtgagatcttgtctctaaaagataaaaattaaaaatgctctgctagaaaaaaaacaacacacacacacacacgcaatagaaaacttgaaggcatcttccttttccaatcccagtaaacacacactactcacagcattggtgatttcaggtctttgtagattctctccccactttcccacctaggagggaaccacccacacttatggtagtctcctcatgccctgggaaggacctgaagaagcacttacttccctttccaaccactttctcatttttgcccagggaaagagcagtagcccatctggcccattggtccctgttttctggtgggtggtggtatcacctgttccacttccacatcttcttggagcacctgcatttgggggcagcaggttctccagatccttatctcctgcattcagagtgggtgacttcgcctcttcttcccatcccatggcataagcactggaggcagggcccagg

SEQ ID NO: 2771 - DNA, 21 bp, Homo sapiens
tgtgtgtttactgggattgga

SEQ ID NO: 2772 - DNA, 20 bp, Homo sapiens
catgcccaggaataaaggtg

SEQ ID NO: 2773 - DNA, 273 bp, Homo sapiens
tgtgtgtttactgggattggaaaaggaagatgccttcaagttttctattgcgtgtgtgtgtgtgtgttgttttttttctagcagagcatttttaatttttatcttttagagacaagatctcactatgttgcctaggcttgcctcaaactcctgggctcaagcaattctcccacctcagcctcccaggtagctgggactacaggcatgcactgcttttagttttgcctgttgcaatggaaatcttcaggaacatcacctttattcctgggcatg

SEQ ID NO: 2774 - DNA, 21 bp, Homo sapiens
ccttcttctcctttggtcctg

SEQ ID NO: 2775 - DNA, 20 bp, Homo sapiens
ggccctcttcctctcttctg

SEQ ID NO: 2776 - DNA, 138 bp, Homo sapiens
ccttcttctcctttggtcctggcccttaaagagagacgtgtgtgtgttgtgtgtgtgggagagggggacggtgcacatgtgcattcacatgtgttttatggatgctacagaggaatatcagaagagaggaagagggcc

SEQ ID NO: 2777 - DNA, 605 bp, Homo sapiens
ctgggttggatttttgaagttctgcccctctccaagactagcttgacaaatacagaagcccatgcagaaaagtttagcagagtatattagtatttttatttttctcttgctttccttaaacaactaactcccagacttcttatgggaaaagtgcaaaccgcagaaaattcctggtgaccctaaactttcacttgccatttatcacagcatcaccccatggcctctgatgctctgggcactcagaagtcaaaagctcacagagaactgccagaaatcatttcacaagtgcttttccatatcctttcatttaatcactcttcaccactgccccccttcaccccaccagaggctaagaacttccttccctccttgcacttcacaagcaatgaagggcagggccagcccctgaacctgtgttcagttatcctggaagctcctcaaatcacctatggtaattagcattgagaccccaaaaagagtcacatcagaaaaatccataggccttggtacagccaggtaaagctgctgcaggataacttcttgatctctgaaaccattctgcttccaatctactttcctttggatgactccagtgaaaaccaaaa

SEQ ID NO: 2778 - DNA, 666 bp, Homo sapiens
gaagtcacttcgacccccgatgacaccgttcaaagcctcctctgtttggctttttgattcctgattgacattcgctggcgaggagagataaatgccaggctgaggacaatgttgatccgctcagactattctcagggaaagacttttcagaataacaaacaaaacaaaacaaaaacccaaaaacattggtgtgcttaagggactgaatagagcccaagaggtccagggacgcagggccaggcctttcaaggggctggcaagtccattgaggagttaattgtttgggtgtacaatgagtttattctggccacatacaaagagctttctcttccaggtccttcaaaagcaaatgtctcaaaggagccagaggaggaatctgtattaatggcatctcttggggtctctgagactgagaagccttggagaatgaggaaaaaagaaaccacttcccccattctgagatgtggaaggtctgtcaacaatcccaagtccccttcaattcttgggctctccccaaaccatgtccatcactggtgaccctccctcatattctttcaggctgccattgtccatctttgaaaaagacatggagataaacttcagcctggtagaagtgctcgaaggttcttgctttgaagggaccacatttatgccagagccaccatc

SEQ ID NO: 2779 - DNA, 556 bp, Homo sapiens
ccatgaggcataaagccacgtgcagggaaggaatcttcctgcagggtagggtcactgagggtgaagagatacagctgctctgccacggggaggtcctaaatggaaatctttatgaagtgagaaacgacaagatgccctgctgccaggaatcacctgtgacatccagcatgctcaaaggctgggaagccaagccaaagcgaacagcaccctctaaccatcatctccgggcacctgggctcctggcttctgacccagcaaataagagcacctcttctaccaaacacaagtccaaggcctaggtccaaggtctacatcagttctgcttccaggcaagccctggagcaacaccaggccccacactgggcactggggagagaacaaggtttctatatgtgctcctgcctcccagtcttaaggggagtcacactccaaatcccccttcacatgtaataagtttactctggataagttgagcccctccttttacttctctggatagcaatatcctcttctaaaattgaaggatacctgcctacaaaatctcgggacacttttt

SEQ ID NO: 2780 - DNA, 592 bp, Homo sapiens
ctgaaaacattctgtttatttctcccatcatccagatgaaaatcttggactgcccatcgggcccagccatcagcaaagaaggtctgcactcaaggagggcaaaaaggttttttggggaagctttgcccttttgcaggtcaaggacctccacagatttcccagatgtagtcagagaagcccatgaggcataaagccacttgcagggaaggaatcttcctgcagggtagggtcactgagggtgaagagatacagctgctctgccacggggaggtcctaaatggaaatctttatgaagtgagaaacgacaagatgccctgctgccaggaatcacctgtgaaatccagcatgctcaaaggctgggaagccaagccaaagcgaacagcaccctctaaccatcatctccgggcacctgggctcctggcttctgacccagcaaataagagcacctcttctaccaaacacaagtccaaggcctaggtccaaggtctacatcagttctgcttccaggcaagccctggagcaacaccaggccccacactgggcactggggagagaacaaggtttctatatgtgctcctgcctcccagtctta

SEQ ID NO: 2781 - DNA, 527 bp, Homo sapiens
aataacaaccctctaccatttggagctctcagtacctttggccgactttcgtgcatcttattgggggagggagagagaatacagagtcctgatctcctttttgcatcaacatctcacccttgggagcttaagattcaagagctatggagactctaacccttgttagaggctgaggccagcagctgagctgacagtcgggtgacacctgaccctgatattattctcatgtactgacaccaagacccaactcttgcagaagccaaagtgatcctgaattatctgacaatcatcccaagaaatgagatgtagcaggaagagaagagtatctatgctggatatactatttgcctcaaactggagtccaaaacaggcatcttttgatgccaaactgtgtgagtttgatctggaagtctttgagggagaataaacacagaacagagccacacaatgtcatttttttaatagcatcacttcccctgactctattaacacctctttccattgaattcaatgagccactgaattga

SEQ ID NO: 2782 - DNA, 22 bp, Homo sapiens
cccttccagaagtggagagtgt

SEQ ID NO: 2783 - DNA, 21 bp, Homo sapiens
gatggtgaacacacacctgga

SEQ ID NO: 2784 - DNA, 483 bp, Homo sapiens
cccttccagaagtggagagtgtaccaattcctgggaggatctgcattttttaaaaaggttaaaacaacccagcttacactgggaaaaattgaaattaaaaaagaaaataataataataaaacttaaacaaacatccaacgttaagacttttcccaaacctgaaaatgagtgggagaatgaacatcagaagtaatgcaagatcttaccatctccatcgaacaccggctgggtctccatcgtgggtgtcggcttagacccgtcatctgaattgagggttaaaaagaatcgaaaggagactaccattattgaggtaaatactatctactctccagcactgttgaatggttggggtttgtacaaggcccggccaagtcccagtgaagagaacaaagaaaaagaaacaaaagaagaaaagggcaagaaggaaaagagaaccatagagagacaaaacaacaaaacaaatccaggtgtgtgttcaccatc

SEQ ID NO: 2785 - DNA, 21 bp, Homo sapiens
ggtgttcgatggagatggtaa

SEQ ID NO: 2786 - DNA, 20 bp, Homo sapiens
ttgttggacaccaggagaca

SEQ ID NO: 2787 - DNA, 269 bp, Homo sapiens
ggtgttcgatggagatggtaagatcttgcattacttctgatgttcattctcccactcattttcaggtttgggaaaagtcttaacgttggatgtttgtttaagttttattattattattttcttttttaatttcaatttttcccagtgtaagctgggttgttttaacctttttaaaaaatgcagatcctcccaggaattggtacactctccacttctggaagggccctctgttctctcaggcttcctgcctgtctcctggtgtccaacaa

SEQ ID NO: 2788 - DNA, 582 bp, Homo sapiens
aagcttgtgctagggacatccatagccacagtgttaacccgtggcatgatttctttttattcttctgtcactctgcccagtctcatgatccagggctggatacgcttagctaggagctgctcaaagtttgctacatattgcactaaaatcccaaccttatcgtcatactttagagacttcactctgccaaacttccagttcctcatcaagggaatatggagtactcagtacagtaaactttagagtacaggccctgagcacctccaacttgaacctyctgcaccccgcactcctatcctctctctatgcctccagagacttccagcctctcttttgccaccagccacaatttctcttgacctagaatttctcctctccaaaatgtcctgcctcaactctcaacgtccctacaacctacacaaaccagtcccactggccaatctccttcctgcaactttcctcactgtatcccatccctacctcattcccctcttgtccatgccagcaccctgcctggaacactcagactcctccccaccactttcaagatccagctcaagtcctggctcttcacaaaagctt

SEQ ID NO: 2789 - DNA, 617 bp, Homo sapiens
ccagtctcatgatccagggctggatacgcttagctaggagctgctcaaagtttgctacatattgcactaaaatcccaaccttattgtcatactttagagacttcactctgccaaacttccagttcctcatcaagggaatatggagtactcagtacagtaaactttagagtacaggccctgagcacctccaacttgaacctyctgcaccccgcactcctatcctctctctatgcctccagagacttccagcctctcttttgccaccagccacaatttctcttgacctagaatttctcctctccaaaatgtcctgcctcaactctcaacgtccctacaacctacacaaaccagtcccactggccaatctccttcctgcaactttcctcactgtatcccatccctacctcattcccctcttgtccatgccagcaccctgcctggaacactcagactcctccccaccactttcaagatccagctcaagtcctggctcttcacaaaagcttttcccagaccatggtgatctctttcttccataaatgtctatgacaataagaacggagaccccgtaatttaaagcactctaagagttgcagctgtcttgagagcaaaggttt

SEQ ID NO: 2790 - DNA, 808 bp, Homo sapiens
cctgcttccctggagaagatttaaaggggataaatcaacaaacgaacgccaaacaaaccacagagaccattctaggggaaacggctgagccgagattgctccagatgggaaagaaaggagtgcgtctcatgtgtgcttcaatcccctttctaatggcttctcatgcgcagaggctgaattcctccatccagagagtgccagggtgcctccagcctctccaggatttggtcacccagtggacagatgggaatcctaagtgacctgagcatactgtggagtgaccttcaatgagggtattggggaggtctcccaagatgagacagtctccatccctcacctgaccccccagggtcccagacttgtcaatgatccaggacctttgtggatcacagagacatctacatctaaacttttagacatgaacatacaaaacttcccataagtgagctgattgcaaaggatattgcacatttcaatcctcctcagagctaagcttgtgctagggacatccatagccacagtgttaacccgtggcatgatttctttttattcttctgtcactctgcccagtctcatgatccagggctggatacgcttagctaggagctgctcaaagtttgctacatattgcactaaaatcccaaccttattgtcatactttagagactttactctgccaaacttccaattccttatcaagggatatggagtactcagtacagtaaactttgagtacaggccctgagcacctccaacttgaacctcttgtaccccgaactcctaatctttttctatgcctccagagact

SEQ ID NO: 2791 - DNA, 808 bp, Homo sapiens
cctgcttccctggagaagatttaaaggggataaatcaacaaacgaacgccaaacaaaccacagagaccattctaggggaaacggctgagccgagattgctccagatgggaaagaaaggagtgcgtctcatgtgtgcttcaatcccctttctaatggcttctcatgcacagaggctgaattcctccatccagagagtgccagggtgcctccagcctctccaggatttggtcacccagtggacaggtgggaatcctaagtgacctgagcatactgtggagtgaccttcaatgagggtattggggaggtctcccaagatgagacagtctccatccctcacctgaccccccagggtcccagacttgtcaatgatccaggacctttgtggatcacagagacatctacatctaaacttttagacatgaacatacaaaacttcccataagtgagctgattgcaaaggatattgcacatttcaatcctcctcagagctaagcttgtgctagggacatccatagccacagtgttaacccgtggcatgatttctttttattcttctgtcactctgcccagtctcatgatccagggctggatacgcttagctaggagctgctcaaagtttgctacatattgcactaaaatcccaaccttattgtcatactttagagactttactctgccaaacttccaattccttatcaagggatatggagtactcagtacagtaaactttgagtacaggccctgagcacctccaacttgaacctcttgtaccccgaactcctaatctttttctatgcctccagagact

SEQ ID NO: 2792 - DNA, 582 bp, Homo sapiens
ctgcttccctgggagaagatttaaaggggataaatcaacaaacgaacgccaaacaaaccacagagaccattctaggggaaacggctgagccgagattgctccagatgggaaagaaaggagtgcgtctcatgtgtgcttcaatcccctttctaatggcttctcatgcacagaggctgaattcctccatccagagagtgccagggtgcctccagcctctccaggatttggtcacccagtggacaggtgggaatcctaagtgacctgagcatactgtggagtgaccttcaatgagggtattggggaggtctcccaagatgagacagtctccatccctcacctgaccccccagggtcccagacttgtcaatgatccaggacctttgtggatcacagagacatctacatctaaacttttagacatgaacatacaaaacttcccataagtgagctgattgcaaaggatattgcacatttcaatcctcctcagagctaagcttgtgctagggacatccatagccacagtgttaacccgtggcatgatttctttttattcttctgtcactctgcccagtctcatgatcca

SEQ ID NO: 2793 - DNA, 22 bp, Homo sapiens
tctgcatggcatatggaaagtt

SEQ ID NO: 2794 - DNA, 22 bp, Homo sapiens
ggagagagctgaagcctcaatg

SEQ ID NO: 2795 - DNA, 487 bp, Homo sapiens
tctgcatggcatatggaaagttaaccaaaatattataatatacagtcaaagaaatttgttaagaggatcaacgacctaagaaagatgatctctgagatgataattgaagaaaattaaagttggaagggattaacttatccaatctctttattttatagctatagaaattgacaaccagacagattaaatgatttttccaaacccacacaataagtagtcacagaaccacggggcaaggaaggatggactgggtacatatataatccaaggaaggttatttacctgaatttcttatgttggtgttgttcagtttggagtccttgatcaccaagtgtttaatccatagagttggggctgtgatttctaggggtgaggaaaaggagagagaaaaagtctgggcaaagagactatgtgagtggaagtgtaacctcagacttcttaatagtcatttttcaaagtctgaggcattgaggcttcagctctctcc

SEQ ID NO: 2796 - DNA, 22 bp, Homo sapiens
gaccaagtggaagatacgaagg

SEQ ID NO: 2797 - DNA, 19 bp, Homo sapiens
tttctccagcccaaccact

SEQ ID NO: 2798 - DNA, 377 bp, Homo sapiens
gaccaagtggaagatacgaaggtgagctctgaattataacatacagcacttttttggctgaaacactcacttggcccttaacaattgtttccttgaatttctttttcacttacccatgcatttgattgctttggggaacgatggaggagaaaagatcatcatcatcatcatcaaaattagaatagcactgtcataatagctactttgttatcaggtcctgtggaactttacatttgtgtcatctcacttgagcttccccataaccctatgagatagctattgttcttgtctccatcttgcagatgaagagtcagaggctgagacagaggaagtaacttgtcctgagtcatagctagggagtggttgggctggagaaa

SEQ ID NO: 2799 - DNA, 22 bp, Homo sapiens
gaccaagtggaagatacgaagg

SEQ ID NO: 2800 - DNA, 19 bp, Homo sapiens
tttctccagcccaaccact

SEQ ID NO: 2801 - DNA, 377 bp, Homo sapiens; identical to SEQ ID NO: 2798

SEQ ID NO: 2802 - DNA, 20 bp, Homo sapiens
actcaagactgccccatcac

SEQ ID NO: 2803 - DNA, 20 bp, Homo sapiens
ggctagcacagggacaagtg

SEQ ID NO: 2804 - DNA, 205 bp, Homo sapiens
actcaagactgccccatcactcttacctgaatttctagcctattggcctgcccaacatattttagatttgccagcccctataattacatagccaattccttaaaatatcactctctctctctctctttatgtatatgtgtgtgtatctataatctgtagatatctagcacttgtccctgtgctagcccttgtccctgtgctagcc

SEQ ID NO: 2805 - DNA, 24 bp, Homo sapiens
tttccaaattagtgagctttatca

SEQ ID NO: 2806 - DNA, 21 bp, Homo sapiens
tgaaggctgttctgagctgtt

SEQ ID NO: 2807 - DNA, 418 bp, Homo sapiens
tttccaaattagtgagctttatcatttttattattttattttattttattttattttattgagacaggttcttactctgtgggccaggctgtagtgcagtggcgtgatcatggctcactgcagcctcaacctcctggactcaggtggccctctcacctcagcctcctgggtaactgggactacaggcatgtgctatcacactggctactttttgtatttatttatttatttttgtaaagacatagtcttgctatgttacccaggctggtctcaaactcctggggtaagcaatctgcctgcctcagcctttccaaatgctgggattataggcatgagccactgagcctggcattttaatgattttattctccatggaacttcatagacactgactataaacagctcagaacagccttca

SEQ ID NO: 2808 - DNA, 22 bp, Homo sapiens
ctcattgaaaacatggctctcc

SEQ ID NO: 2809 - DNA, 22 bp, Homo sapiens
tgggagacagctctctgtggta

SEQ ID NO: 2810 - DNA, 478 bp, Homo sapiens
ctcattgaaaacatggctctcccaggcactcatctcccaccagaccagggcaggaacactgggagatgccagcatggataacagccagcaggtgcgtttttcccaggacccagtctggggggcttaccgtgtggaggtcccaggcagcgggcgccctgtgtccaccagcacacaccagcagtagccagtggactggtggcattgcactggcttatagagtcccccaggggcacattcagggatgacaataccctcacggggattctgctgggcctcttccagggcactctgcctctcctggtcacacgaatagactttctctgcaagagaagacacagcctgtggtgactatcactcctgtgatttaacactcctgtcttctgtgcccagcatccaaagtaagtagcaaggaccaggcctggacccaggaactgatgagctgccccattgatgaattaccacagagagctgtctccca

SEQ ID NO: 2811 - DNA, 20 bp, Homo sapiens
gggatgacaataccctcacg

SEQ ID NO: 2812 - DNA, 20 bp, Homo sapiens
aggcctggtccttgctactt

SEQ ID NO: 2813 - DNA, 847 bp, Homo sapiens
gatccatggaagctagtggcttagaaagggcaataatctcatcaggaaactgacgttcagagaggttaagtactgttccaaggtcttaagttagaaagagacaggcctgtgaccagaatccaggtcccagggtctttctacctgaaactcttctactcattgaaaacatggctctcccaggcactcatctcccaccagaccagggcaggaacactgggagatgccagcatggataacagccagcaggtgcgtttttcccaggacccagtctggggggcttaccgtgtggaggtcccaggcagcgggcgccctgtgtccaccagcacacaccagcagtagccagtggactggtggcattgcactggcttatagagtcccccaggggcacattcagggatgacaataccctcacggggattctgctgggcctcttccagrgcactctgcctctcctggtcacacgaatagactttctctgcaagagaagacacagcctgtggtgactatcactcctgtgatttaacactcctgtcttctgtgcccagcatccaaagtaagtagcaaggaccaggcctggacccaggaactgatgagctgccccattgatgaattaccacagagagctgtctcccatgccagcgcatgctgaggggcctggaggttcagaacctccctgtggccatctctgctgccagcattcattagcattcccaccaaataggttcaactgcagcaacaagccagccagggactccagggatgccccttctcagagtggcagcttgtcccaagggtggaatatctcaatgttttcagagtggctcctgctgatgttctgtctgtggac

SEQ ID NO: 2814 - DNA, 22 bp, Homo sapiens
ctcattgaaaacatggctctcc

SEQ ID NO: 2815 - DNA, 22 bp, Homo sapiens
tgggagacagctctctgtggta

SEQ ID NO: 2816 - DNA, 478 bp, Homo sapiens
ctcattgaaaacatggctctcccaggcactcatctcccaccagaccagggcaggaacactgggagatgccagcatggataacagccagcaggtgcrtttttcccaggacccagtctggggggcttaccgtgtggaggtcccaggcagcgggcgccctgtgtccaccagcacacaccagcagtagccagtggactggtggcattgcactggcttatagagtcccccaggggcacattcagggatgacaataccctcacggggattctgctgggcctcttccagggcactctgcctctcctggtcacacgaatagactttctctgcaagagaagacacagcctgtggtgactatcactcctgtgatttaacactcctgtcttctgtgcccagcatccaaagtaagtagcaaggaccaggcctggacccaggaactgatgagctgccccattgatgaattaccacagagagctgtctccca

SEQ ID NO: 2817 - DNA, 22 bp, Homo sapiens
aagacgaagaggcacaaggaag

SEQ ID NO: 2818 - DNA, 22 bp, Homo sapiens
gtctcagtgggaacattgatgc

SEQ ID NO: 2819 - DNA, 475 bp, Homo sapiens
aagacgaagaggcacaaggaagagaagcaatgtgcacaagagcagagctaattagggataaatcccagaccaggatgtagatcccacggctcctggctccatcttacacatggggaaacagacaaagaggagacagcttcttctgcataatgagagggtggaggaacagaaggaggtgatggcgccggcagggcagcatcgtctcccacctggtagctccctgtccttgaaggggtcatccgcctctgtagtcttggccctggcgtcgctctcacaactgggcatcacgtagctgggaaaagagagatatggggggggttgggaggggctggcaactgagcctacttcagtcactactgcccagcaatgatctatgttgtcaccaagcctaaagcactgagggtgggcagaacgatatctcttgcgctgcccggcagctacaaggcaatcttagcatcaatgttcccactgagac

SEQ ID NO: 2820 - DNA, 22 bp, Homo sapiens
aagacgaagaggcacaaggaag

SEQ ID NO: 2821 - DNA, 22 bp, Homo sapiens
gtctcagtgggaacattgatgc

SEQ ID NO: 2822 - DNA, 475 bp, Homo sapiens
aagacgaagaggcacaaggaagagaagcaatgtgcacaagagcagagctaattagggataaatcccagaccaggatgtagatcccacggctcctggctccatcttacacatggggaaacagacaaagaggagacagcttcttctgcataatgagagggtggaggaacagaaggaggtgatggcgccggcagggcagcatcgtctcccacctggtagctccctgtccttgaaggggtcatccgcctctgtagtcttggccctggcgtcgctctcacaactgggcatcacgtagctgggaaaagagagatatggggggggwtgggaggggctggcaactgagcctacttcagtcactactgcccagcaatgatctatgttgtcaccaagcctaaagcactgagggtgggcagaacgatatctcttgcgctgcccggcagctacaaggcaatcttagcatcaatgttcccactgagac

SEQ ID NO: 2823 - DNA, 22 bp, Homo sapiens
aagacgaagaggcacaaggaag

SEQ ID NO: 2824 - DNA, 22 bp, Homo sapiens
gtctcagtgggaacattgatgc

SEQ ID NO: 2825 - DNA, 475 bp, Homo sapiens
aagacgaagaggcacaaggaagagaagcaatgtgcacaagagcagagctaattagggataaatcccagaccaggatgtagatcccacggctcctggctccatcttacacatggggaaacagacaaagaggagacagcttcttctgcataatgagagggtggaggaacagaaggaggtgatggcgccggcagggcagcatcgtctcccacctggtagctccctgtccttgaaggggtcatccgcctctgtagtcttggccctggcgtcgctctcacaactgggcatcacgtagctgggaaaagagagatatkgggggggttgggaggggctggcaactgagcctacttcagtcactactgcccagcaatgatctatgttgtcaccaagcctaaagcactgagggtgggcagaacgatatctcttgcgctgcccggcagctacaaggcaatcttagcatcaatgttcccactgagac

SEQ ID NO: 2826 - DNA, 22 bp, Homo sapiens
cgggtcaaagctatgggtacat

SEQ ID NO: 2827 - DNA, 22 bp, Homo sapiens
tttggtctgatggtcctttgtg

SEQ ID NO: 2828 - DNA, 464 bp, Homo sapiens
cgggtcaaagctatgggtacatggtttcaggaaaaagatcaacttccagcccttgccctcctcaaaccctgcccactctctcaccctccctcagcatttgaaaagtcaggggccccacatttttctcctgggcctgattcctgctcacaatctcacctcccacctccagtgggcgctgctgagttaatggcctgaaccatgtcagtggtgagagcatccagtaggctggtgataaactccattttcttcccttctggacagcctaaaagataaaatgagatttgaaggtagatgccagataataatcaagtcaacagctttctcaactaccatcctttcctaaacttctcaaagcccttcttgtccagccaaatccactttagtgatttgtttactgatcagatgagtctcataaacttccatagttcctttacccataccccacaaaggaccatcagaccaaa

SEQ ID NO: 2829 - DNA, 19 bp, Homo sapiens
tgcccactctctcaccctc

SEQ ID NO: 2830 - DNA, 22 bp, Homo sapiens
ttatcaccagcctactggatgc

SEQ ID NO: 2831 - DNA, 1131 bp, Homo sapiens
cctcagctaccacctcaattcctgacctgagctgtatttggctatatgagtgtccagttccattgccaagagctccttggaattctcaggatgccaaaaaggcatttggttcctgccttctaggagagaagaaaattgcaaagtgctttgtgctccctctctgcctccctgttcccatgatataaccatcacccttcctgccattcagaactctcactccaacccatcaccttctgagattaaacagctggaagtcccagacagccctggactttcctataaatcaggtaactaaaagctagggacaagcagctcccaaagaatagggaaggtagaggggcaggaagatttttgacagaaggcgggtcaaagctatgggtacatggtttcaggaaaaagatcaacttccagcccttgccctcctcaaaccctgcccactctctcaccctccctcagcatttgaaaagtcaggggccccacatttttctcctgggcctgattcctgctcacwatctcacctcccacctccagtgggcgctgctgagttaatggcctgaaccatgtcagtggtgagagcatccagtaggctggtgataaactccattttcttcccttctggacagcctaaaagataaaatgagatttgaaggtagatgccagataataatcaagtcaacagctttctcaactaccatcctttcctaaacttctcaaagcccttcttgtccagccaaatccactttagtgatttgtttactgatcagatgagtctcataaacttccatagttcctttacccataccccacaaaggaccatcagaccaaataatgctttcaattttcttccattccacacatttttgctagacatcaactcaggcaccatgttaaacgctagagatacagagttaacaatacagaaggtccttatccttgtaaagttcacatctacaggggaactcaagctaatagccaagcagtcgtcctaaagtgagaaaaatactgtgctaggggtaagaactaggggctgtgggagcacaaaggagggagagaacccccagtggtcaaagttgacttaagtacacctaccaccagatccatccaagagcctcctccttttttcacttccct

SEQ ID NO: 2832 - DNA, 20 bp, Homo sapiens
ggctagagcctccattcctc

SEQ ID NO: 2833 - DNA, 22 bp, Homo sapiens
ccctaaatccattcaaagtcca

SEQ ID NO: 2834 - DNA, 100 bp, Homo sapiens
ggctagagcctccattcctctagatcaagggttttgttttgttttgtttttgtcttttttttttttaacctgagtccatggactttgaatggatttaggg

SEQ ID NO: 2835 - DNA, 22 bp, Homo sapiens
tcaattccaccactgtctcaaa

SEQ ID NO: 2836 - DNA, 22 bp, Homo sapiens
gaggagccgtttctacctgact

SEQ ID NO: 2837 - DNA, 521 bp, Homo sapiens
tcaattccaccactgtctcaaacatctagcatgaagcatagcacacttccagcaaataattgatgaatagatgagtatctggaatctcatttatcagagagcccttggtcccatgcctgggtgggggcaagtattgaaaggccaggagcacaggggagagcactcaccttctttgctaacacccaggcagcccttcagctcaggcagtgaaatgaccttgtctttgttcaggtcacagtagtcggtgaaacgccgggcacatttcttgggcttggctttcttcttcacgtagcgcttgaagggcttcatctcccgcttgttaatgtcgttgctgctattgctgtccagctggctgaaataccagtgcactacccgctcctccagggtgtggctggggtctggctctgagaacctgggccatggacaaacacccccaccgcagagaacaccaatcaggatcttgcaggaaccatcagccctggtatgactgcccccagaaagtcaggtagaaacggctcctc

SEQ ID NO: 2838 - DNA, 22 bp, Homo sapiens
tcaattccaccactgtctcaaa

SEQ ID NO: 2839 - DNA, 22 bp, Homo sapiens
gaggagccgtttctacctgact

SEQ ID NO: 2840 - DNA, 176 bp, Homo sapiens
tcaattccaccactgtctcaaacatctagcatgaagcatagcacacttccagcaaataattgatgaayagatgagtatctggaatctcatttatcagagagcccttggtcccatgcctgggtgggggcaagtattgaaaggccaggagcacaggggagagcactcaccttctttgc

SEQ ID NO: 2841 - DNA, 17 bp, Homo sapiens
atttccaggactggccc

SEQ ID NO: 2842 - DNA, 17 bp, Homo sapiens
agcatggtcgcaggttg

SEQ ID NO: 2843 - DNA, 397 bp, Homo sapiens; identical to SEQ ID NO: 495
  misc_feature 177: n = A,T,C or G

SEQ ID NO: 2844 - DNA, 20 bp, Homo sapiens
tcatggcttgacacagtgga

SEQ ID NO: 2845 - DNA, 20 bp, Homo sapiens
tggttgactgaggatggaga

SEQ ID NO: 2846 - DNA, 249 bp, Homo sapiens
tcatggcttgacacagtggaaaatttttctttcccatataatagttcagcatggtcgcaggttgtagggtgtgtgtgtgtgtgagtgtgtgtatgtgtgtgtgtgtgtgtgtgtgtgtgtaggggtaggagtaggggcagggattgctctatgcagtcactctgggatccaggctgagagtgactctgccatcttcatcatgtggcttccaaggttactctgggggtcatctccatcctcagtcaacca

SEQ ID NO: 2847 - DNA, 20 bp, Homo sapiens
tcatggcttgacacagtgga

SEQ ID NO: 2848 - DNA, 20 bp, Homo sapiens
tggttgactgaggatggaga

SEQ ID NO: 2849 - DNA, 249 bp, Homo sapiens; identical to SEQ ID NO: 2846

SEQ ID NO: 2850 - DNA, 22 bp, Homo sapiens
atgccaatgcctgtacaaaaga

SEQ ID NO: 2851 - DNA, 22 bp, Homo sapiens
tgtggggaaattgatggacata

SEQ ID NO: 2852 - DNA, 521 bp, Homo sapiens
atgccaatgcctgtacaaaagaactatacaatttacatatatatttatatacagcatataaatctctttcttctcagccccaacaacaccctcccccacccccccaaaaccctctaaaagttgtcagtagcagatccaaaaacttacaataagagagagaataaagtctttcttccctttccttttcccactgtggtattagatattggtgttttaaaatgaaaccaaaaacaaaacacgcaagtaagagttattaaaagtgcaaacatggtgggcaccacttatgttacacgggatgtggcagggccatgggcaacgctgaaggttaggtgtctggtgatccatcctgcctccctggactctccacctgcccttgggttttctgctccttagacgaggcgtcctactgagagaaggaaggagaatgcaaaaaaaaaaaaaaaaaggtcgggggcagatataagcaagaagttagagttgggcttgtgagaaatccagctatgtccatcaatttccccaca

SEQ ID NO: 2853 - DNA, 22 bp, Homo sapiens
cctcccctctcatgcgttatac

SEQ ID NO: 2854 - DNA, 22 bp, Homo sapiens
tggggctgagaagaaagagatt

SEQ ID NO: 2855 - DNA, 599 bp, Homo sapiens
cctcccctctcatgcgttatacagagtagatgctaagcatggatgaaaacgtttcgagtgacgtaatgcaaatcctttgtggataatttgctccgagggtcactaagatactggtgcacccaccaatgctgggccctttgggggtccggagagcaggaatgcacggaccctctgagagccggtacctgtgtgggctattcatgggatctggactcccttcctctcccagggcagtttccatctctccttagcccaacctccctggacaaggccgagagccaagtgacttatcaattttgacaactaatggcatggggcaatatagtcctcccaccagaaaagaactcgtggagtccgcagtacaattgcaggactcccgtctttatacacaagggtcagtctccaaacagaagtttagtaggcccaggatagagtcctggattttagaaagctggactatgtgtccagagtgcccaccacccacagcaggcagagggagagaaataaacaaacagcaatgccaatgcctgtacaaaagaactatacaatttacatatatatttatatacagcatataaatctctttcttctcagcccca

SEQ ID NO: 2856 - DNA, 22 bp, Homo sapiens
tctaggggaggcagaataggaa

SEQ ID NO: 2857 - DNA, 22 bp, Homo sapiens
tccacaaaggatttgcattacg

SEQ ID NO: 2858 - DNA, 512 bp, Homo sapiens
tctaggggaggcagaataggaaacccaagatcagttttacttctggaattagcttaaagcctggaagcccataagaaaacttgagggaacaggaagaacctcagtattgggtttttaaaaaaccaacaaaacaactttagtgttaccaacaaggtgactgacacctcccccaacccacccacccaggcctgtgatagccactaggacaacagcaggagatggaggagtggagaggtcacacccaatctgcccctggcactgagacagctgcgtctctgggagcctcactggtaggtttgcagggaggtgaagagtttccctgttggcaccgcacccctcagtgcaggctttctgtcctgtcccctcccctgcttagatattaaatatctacttttttaaaggcccttctgtgtgtctttttcttctttgcctcccctctcatgcgttatacagagtagatgctaagcatggatgaaaacgtttcgagtgacgtaatgcaaatcctttgtgga

SEQ ID NO: 2859 - DNA, 21 bp, Homo sapiens
tgagggaacaggaagaacctc

SEQ ID NO: 2860 - DNA, 20 bp, Homo sapiens
gcagattgggtgtgacctct

SEQ ID NO: 2861 - DNA, 1420 bp, Homo sapiens
tggggctaatgggagaaggcttccttcccacctttccacgttggggcagggccaccagtcattcctgagataacctctaggactttctccaggacagcagggacctcctttagcccaagaccccatcagatcctgtcccgagaaggttgtgctcctcccacagggacagtgcttgtggtgccaacgccttccagacccggaacgggtggaggtacttttagggatgtcgggttggaatacaagatgaggccagatttgcaagggtgatctgaggaggggaccagtccagggctacccaacctccctcactgccaccacagctgcttatgggaaggggcgctaagggccacttgctgctctgcctgaaggccacttgaataggcacagcacctgggcagagggagctgcgcctcagaccagaaggctgggcagcccaccctagaatccgcggaagatgcctgtgatgcctgtggaaagctgggccgggatttccctgtagctgggttatcacccctgcccttctaggggaggcagaataggaaacccaagatcagttttacttctggaattagcttaaagcctggaagcccataagaaaacttgagggaacaggaagaacctcagtattgggtttttaaaaaaccaacaaaacaactttagtgttaccaacaaggtgactgacacctcccycaacccacccacccaggcctgtgatagccactaggacaacagcaggagatggaggagtggagaggtcacacccaatctgcccctggcactgagacagctgcgtctctgggagcctcactggtaggtttgcagggaggtgaagagtttccctgttggcaccgcacccctcagtgcaggctttctgtcctgtcccctcccctgcttagatattaaatatctacttttttaaaggcccttctgtgtgtctttttcttctttgcctcccctctcatgcgttatacagagtagatgctaagcatggatgaaaacgtttcgagtgacgtaatgcaaatcctttgtggataatttgctccgagggtcactaagatactggtgcacccaccaatgctgggccctttgggggtccggagagcaggaatgcacggaccctctgagagccggtacctgtgtgggctattcatgggatctggactcccttcctctcccagggcagtttccatctctccttagcccaacctccctggacaaggccgagagccaagtgacttatcaattttgacaactaatggcatggggcaatatagtcctcccaccagaaaagaactcgtggagtccgcagtacaattgcaggactcccgtctttatacacaagggtcagtctccaaacagaagtttagtaggcccaggatagagtcctggattttagaaagctggactatgtgtccagagt

SEQ ID NO: 2862 - DNA, 21 bp, Homo sapiens
gccaccagtcattcctgagat

SEQ ID NO: 2863 - DNA, 22 bp, Homo sapiens
tcttatgggcttccaggcttta

SEQ ID NO: 2864 - DNA, 546 bp, Homo sapiens
gccaccagtcattcctgagataacctctaggactttctccaggacagcagggacctcctttagcccaagaccccatcagatcctgtcccgagaaggttgtgctcctcccacagggacagtgcttgtggtgccaacgccttccagacccggaacgggtggaggtacttttagggatgtcgggttggaatacaagatgaggccagatttgcaagggtgatctgaggaggggaccagtccagggctacccaacctccctcactgccaccacagctgcttatgggaaggggcgctaagggccacttgctgctctgcctgaaggccacttgaataggcacagcacctgggcagagggagctgcgcctcagaccagaaggctgggcagcccaccctagaatccgcggaagatgcctgtgatgcctgtggaaagctgggccgggatttccctgtagctgggttatcacccctgcccttctaggggaggcagaataggaaacccaagatcagttttacttctggaattagcttaaagcctggaagcccataaga

SEQ ID NO: 2865 - DNA, 21 bp, Homo sapiens
gccaccagtcattcctgagat

SEQ ID NO: 2866 - DNA, 22 bp, Homo sapiens
tcttatgggcttccaggcttta

SEQ ID NO: 2867 - DNA, 546 bp, Homo sapiens
gccaccagtcattcctgagataacctctaggactttctccaggacagcagggacctcctttagcccaagaccccatcagatcctgtcccgagaaggttgtgctcctcccacagggacagtgcttgtggtgccaacgccttccagacccggaacgggtggaggtacttttagggatgtcgggttggaatacaagatgaggccagatttgcaagggtgatctgaggaggggaccagtccagggctacccaacctccctcactgccaccacagctgcttatgggaaggggcgctaagggccacttgctgctctgcctgaaggccacttgaataggcacagcacctgggcagagggagctgcgcctcagaccagaaggctgggcagcccaccctagaatccgcggaagatgcctgtgatgcctgtggaaagytgggccgggatttccctgtagctgggttatcacccctgcccttctaggggaggcagaataggaaacccaagatcagttttacttctggaattagcttaaagcctggaagcccataaga

SEQ ID NO: 2868 - DNA, 22 bp, Homo sapiens
ctaggttcatcattggcagcac

SEQ ID NO: 2869 - DNA, 21 bp, Homo sapiens
ggtcttgggctaaaggaggtc

SEQ ID NO: 2870 - DNA, 514 bp, Homo sapiens
ctaggttcatcattggcagcacctcagatgtccttggatggaagtggagagcacccaggccagggaaacgaactaagctttctaggaaataaagccttttcattaaaggaagccacccaaagaaagaggcaacagccgccaagatttacccattttttattttttataaaacaagctacaaatagtttccctctctccttcacaaaggaaaaccacacaacaccacctacacacacgatcctgtgggagacaagatgcctggggagatctcgaagatccaaacatctacaggcaggcgccgtctccatgtgtgcatgcttcctccaggcctgaaagtggggccagtgtctcgtgcaaggcccactcagctccggcacgttgagttctctcattggggctaatgggagaaggcttccttcccacctttccacgttggggcagggccaccagtcattcctgagataacctctaggactttctccaggacagcagggacctcctttagcccaagacc

SEQ ID NO: 2871 - DNA, 20 bp, Homo sapiens
cagcaccaacccacttgtag

SEQ ID NO: 2872 - DNA, 20 bp, Homo sapiens
aggcctaacaccacagacca

SEQ ID NO: 2873 - DNA, 259 bp, Homo sapiens
cagcaccaacccacttgtagattaacaacaacaacaaaacaccaacaaataaaaaaaagcaaaacaacaacaacaaaacaaaacaaaaaccaaaaactaaaaaaccaaaccaaaaccaaaaagccctggatcaccaggctgttcatctggctatttactcccaagttcctgaaagacctgcaaggccacagttgtgcccaccaaggaggctgaagaccttcccaggcaccatgaccttctggtctgtggtgttaggcct

SEQ ID NO: 2874 - DNA, 21 bp, Homo sapiens
gcagcattcttcacattagcc

SEQ ID NO: 2875 - DNA, 20 bp, Homo sapiens
ctccttgagcaacagcttcc

SEQ ID NO: 2876 - DNA, 365 bp, Homo sapiens
gcagcattcttcacattagccaagatgtggaaataatccaagtgtctgttgatggatgaatgagtagagaagttgtagtgtgtgtgtgtgtgtgtgtgtgtgtatgtgtatatgcacacacacaatatgcatataatggagtattatttggccttaaaaaagaaagaaatcctgccacttgtgacaacatggatgaaactggaagacattatgctacgtgaaataagccaggcacagaaaacacaactacagcatgatttcactcatatgtggaatctacaaaagttggaactcatagacacagagtgtagaagggtggttaccaggggatgggttggggagagaggaagctgttgctcaaggag

SEQ ID NO: 2877 - DNA, 18 bp, Homo sapiens
aaccaacccaacatttcc

SEQ ID NO: 2878 - DNA, 18 bp, Homo sapiens
ggatctttaggctttctg

SEQ ID NO: 2879 - DNA, 22 bp, Homo sapiens
gtctctcattcctgggttcagc

SEQ ID NO: 2880 - DNA, 22 bp, Homo sapiens
gtgaagttcctggggcttaggt

SEQ ID NO: 2881 - DNA, 626 bp, Homo sapiens
gtctctcattcctgggttcagcccaccagctcaagctgctttttgggcatactggaagacaagccctgcacaccttagcctcctaccagttcccatgtgtctttgtccttttccagatacgtttgccagcaaagctgctgccctccaggatgtatatgcagacgcctccattggcaacgtgacgggcagcaacgccgtcaatgtcttcctgggcatcggcctggcctggtccgtggccgccatctactgggctctgcagggacaggagttccacgtgtcggccggcacactggccttctccgtcaccctcttcaccatctttgcatttgtctgcatcagcgtgctcttgtaccgaaggcggccgcacctgggaggggagcttggtggcccccgtggctgcaagctcgccacaacatggctctttgtgagcctgtggctcctctacatactctttgccacactagaggcctattgctacatcaaggggttctaagccacacaacagagcctccagcagggcaggcctaggacttctcctaagagaagggcacttccccaccagtgatctctcccgactgcactgccctggagaggcagcatcaggacctaagccccaggaacttcac

SEQ ID NO: 2882 - DNA, 20 bp, Homo sapiens
tctgcctggcttacctcatt

SEQ ID NO: 2883 - DNA, 22 bp, Homo sapiens
ggtgggaagaaatatcagagga

SEQ ID NO: 2884 - DNA, 161 bp, Homo sapiens
tctgcctggcttacctcattattgccattttttttagatctcccagagaaaacctcttaccctttcttgcctatggccttgtttttttgtttgtttgtttgtttttgtttctgttgttattgttgttttttgcttctgatcctctgatatttcttcccacc

SEQ ID NO: 2885 - DNA, 1377 bp, Homo sapiens
ggggtacatgtgcagaacatagagttttgttacataggtatacacgtgccatggcggtttgctgcacccatcaacccgtcatctacattaggtatttctcctaatgctatccctcccctatccctcacccctgacaggctccagtgtgtgatgttcctctccctgtgtccatgtgttctcattgttcaactcccacttatgagtgagaacatgcagtgtttggttttctgttcttgtgttagtttgctgagaatgatggtttgcatcctcctttctttctgctccactgtcttgtccctcttaatctccttctttcttctcttccttattccctggccctctctctcccactctaccttggtgccctgcattcaaattgacctatgaggcagcccaaattgtttccccactattttctggcacgctggccctggcccccaccagctgcccagaagacagctggagtccccttctagcggatgatgcctgtggtgcgggttgggcttgactttctcatgaatgattatctgacttcgttacccgttctcttgyctgtttatcttgccttcagcaggggatgaggatgaggatgaatccggggaggagaggctgccctcctgctttgactacgtcatgcacttcctgactgtcttctggaaggtgctgtttgcctgtgtgccccccacagagtactgccacggctgggcctgcttcgccgtctccatcctcatcattggcatgctcaccgccatcattggggacctggcctcgcacttcggctgcaccattggtctcaaagattcagtcacagctgttgttttcgtggcatttggcacctctgtcccaggtgagagtgagaggtgcttgaatttgcaaagaggattttacctggttcaaatgacccctggactccatctcattatcttccacaccatctcagatctgaacttaacagagcctctgcccttaaagtgcacaaaagtcaatcaaagagatgaataatgacattagtaatgacagctaatatttcttgagcactttcaatgtgacagacaccatgtgtgttcagcaatttacacatttacattttccccctgtaatgtttcccaaagccctattaaatagggtaagttattatccccacttcacagacaaagaaactgaggcccacagaggttaagctacatgcccaagtaagtggtccaatttcttaacctccacattatgtgagtagaccacaaacagtgaaattaaaagaatgtagatattgttctccttctatttacctctggcgatctctgagaggttaaagattagccagctcaaagatatcaaaggagaaatgcccacatacattcttggcctcctctacttgga

SEQ ID NO: 2886 - DNA, 20 bp, Homo sapiens
atgtggcctacattccgttt

SEQ ID NO: 2887 - DNA, 20 bp, Homo sapiens
gtctcccaaccaccatcact

SEQ ID NO: 2888 - DNA, 270 bp, Homo sapiens
atgtggcctacattccgtttattgtcttgaggggcacagtcaggtcatcagagggggagctagaaagatctaaagcaggtgatgagaaaagtggggtagcagcagcagcagcagcagcaaacctctcttcctggctgtctttttgctctggctctggggccttggggatatgaccctgtgggttgctatgacaacaaagtctctcaataaaagacaaggccaggaggcctcagtggtgctgagaggtgatagtgatggtggttgggagac

SEQ ID NO: 2889 - DNA, 22 bp, Homo sapiens
tcctcattcctccattcctagc

SEQ ID NO: 2890 - DNA, 22 bp, Homo sapiens
attgccttcctcacaattgctt

SEQ ID NO: 2891 - DNA, 500 bp, Homo sapiens
tcctcattcctccattcctagccctagggtagccgggaaagcataggagcaaatgcccttaccagggccctggtgctcagcagcctctccggctgctcacacctcttgctgctgctctgtgcatgctccaaaggcttctttttgcgtatggctgctgagctctcacctactaagctctctgctttccttatgctgccagcaaccacaaaacctggtgatactttcaagatgggacattaatgctctttccttttctttcttccatttttctggtatccatttgcaaacagcgctcctgttatctccaggtaagaggtgtcttgtccccctcttttctttccacttcttgccagtgccattatttggtttaagaccaatgtcctttgatttattgaataagaactgcaggctcaagttaacctgacaatttctcccaaggactgggagatttattttcccacatgaagaaattatgagaaagcaattgtgaggaaggcaat

SEQ ID NO: 2892 - DNA, 22 bp, Homo sapiens
tcctcattcctccattcctagc

SEQ ID NO: 2893 - DNA, 22 bp, Homo sapiens
attgccttcctcacaattgctt

SEQ ID NO: 2894 - DNA, 1387 bp, Homo sapiens
ggatggaagacatagacctgggcactgttccactcttgcacaatgctacccatttccttgagctcccattcaagccccatggtcatttttgccactcataagttagctactctggcagggttgcaacttacacagttttcatgataactggattctcactcctttttttacagaatggatgtgataacctggtatcctacacagtcatgagtgaccaacctacccatttggttccccatcctcattcctccattcctagccctagggtagccgggaaagcataggagcaaatgcccttaccagggccctggtgctcagcagcctctccggctgctcacacctcttgctgctgctctgtgcatgctccaaaggcttctttttgcgtatggctgctgagctctcacctactaagctctctgctttccttatgctgccagcaaccacaaaacctggtgatactttcaagatgggacattaatgctctttccttttctttcttccatttttctggtatccatttgcaaacagcgctcctgttatctccaggtaagaggtgtcttgtccccctcttttcyttccacttcttgccagtgccattatttggtttaagaccaatgtcctttgatttattgaataagaactgcaggctcaagttaacctgacaatttctcccaaggactgggagatttattttcccacatgaagaaattatgagaaagcaattgtgaggaaggcaattccttgagcatcacttctgtctggggacgtgggttaaggcatagctgatcctctctgggaccaggaagagaaattaagcttaacaaggagatggtgggtcatagacttctcctgagtcttaattcatctgccatctcatgttgtgggggaagagacagtgagattcagagctggaatctcctaatataattgtgacaggatttgaaaaaaaaatactttaatcccaagggatccaggaaataaccaaacctgttgtgagaataggaaatgcaatttttaaagaatctggaattttaccagtcctggagatcttccatctcatcacagctgagacttaaattgctagaattttggttcatttgtcattgacccttaaagtcctatgtgccgtgaacaagatgaattaggatgggggattggggcagtgttctggctggaaatataaattttagagaatttattttgaagagattctcatgcagaatctaggtgctatagaggacgtacacctactttgagagtatgcttgcatgagtggaaaccaatcataaacaacattcaacttcatgagcagatatgaaagcattttcagcatatctagcaatactataactctttgtgcaagcagagtggcctacacaagacagtt

SEQ ID NO: 2895 - DNA, 22 bp, Homo sapiens
tcctcattcctccattcctagc

SEQ ID NO: 2896 - DNA, 22 bp, Homo sapiens
attgccttcctcacaattgctt

SEQ ID NO: 2897 - DNA, 500 bp, Homo sapiens
tcctcattcctccattcctagccctagggtagccgggaaagcataggagcaaatgcccttaccagggccctggtgctcagcagcctctccggctgctcacacctcttgctgctgctctgtgcatgctccaaaggctkctttttgcgtatggctgctgagctctcacctactaagctctctgctttccttatgctgccagcaaccacaaaacctggtgatactttcaagatgggacattaatgctctttccttttctttcttccatttttctggtatccatttgcaaacagcgctcctgttatctccaggtaagaggtgtcttgtccccctcttttctttccacttcttgccagtgccattatttggtttaagaccaatgtcctttgatttattgaataagaactgcaggctcaagttaacctgacaatttctcccaaggactgggagatttattttcccacatgaagaaattatgagaaagcaattgtgaggaaggcaat

SEQ ID NO: 2898 - DNA, 21 bp, Homo sapiens
gcagaataaacaagctcttgc

SEQ ID NO: 2899 - DNA, 20 bp, Homo sapiens
aatggatcaatggctttcct

SEQ ID NO: 2900 - DNA, 337 bp, Homo sapiens
  misc_feature 86, 88, 111, 129, 147: n = A,T,C or G
ttcggtggcatgtatgagtgaaaaccagggcataagggacctttctggaagagctgctttgtctgacccacctgtgttcatttatntnctgggatctctgatctccctgancttgggggaagctcttcnacgcaaactcccggaagnagcagaataaacaagctcttgcctatctatctatctatctatctatctatctatctatctatctacctatctgcctatctatatctatctatctcaatgtagtgaggaaagccattgatccattaacctttggaattctacatgggagatacctaaaaaagtgaactgccttgtttatgtatcatgcagt

SEQ ID NO: 2901 - DNA, 20 bp, Homo sapiens
cagggacaagctggaaagag

SEQ ID NO: 2902 - DNA, 20 bp, Homo sapiens
tggaagccttcggatagaaa

SEQ ID NO: 2903 - DNA, 164 bp, Homo sapiens
cagggacaagctggaaagagcataggactgtgagtaattaggaagcatctgggcagcttgtcaagatgagcccacggttgtcgaaaaaggaggaccaaacaggccccattcttcagagagagagagagagacagagagctttcctttctatccgaaggcttcca

SEQ ID NO: 2904 - DNA, 20 bp, Homo sapiens
agggcttgtgtcccttcttt

SEQ ID NO: 2905 - DNA, 20 bp, Homo sapiens
ccaccactgaagccctatga

SEQ ID NO: 2906 - DNA, 225 bp, Homo sapiens
agggcttgtgtcccttctttatgtctatactcacttccattgtgagtttcagaaagaaaattttaaaagaaaagtatttatgaggaaggaaaaccagacagaggaagagaagagagagagagagagagagtgagagagaaagagaaagagagagagagagagaagaaagggaggtagaattgtgtgatctttctcattctttatctcatagggcttcagtggtgg

SEQ ID NO: 2907 - DNA, 21 bp, Homo sapiens
gttggggcaaacttggatctt

SEQ ID NO: 2908 - DNA, 22 bp, Homo sapiens
caattaccatcggtcttgagca

SEQ ID NO: 2909 - DNA, 491 bp, Homo sapiens
gttggggcaaacttggatctttctgaatcttttaactgtttccttctcttcccgtttttgtctgctggctgacttgtcctacactctactccttgcttatgatacttatttttccatccacagcaaaacaattcacatcaaggtaattgatgatgaggcatatgagaaaaacaagaattacttcattgagatgatgggcccccgcatggtggatatgagttttcagaaaggtgtagtaccctgtcctccacactaacactaacattcttctctcctcttctgtttcttcctctccaacccatttgtctcctcctcctcttgtcttccacctctctggttccctttcccttgtctcctctcttgctctctctcctgctctcttttcactcctccctctcctctgtcctctctctgcccccagctctgtcctaacacctgccagcctracacatggcatccatacgagggatgctcaagaccgatggtaattg

SEQ ID NO: 2910 - DNA, 21 bp, Homo sapiens
gttggggcaaacttggatctt

SEQ ID NO: 2911 - DNA, 22 bp, Homo sapiens
caattaccatcggtcttgagca

SEQ ID NO: 2912 - DNA, 409 bp, Homo sapiens
gagatgatgggcccccgcatggtggatatgagttttcagaaaggtgtagtaccctgtcctccacactaacactaacattcttctctcctcttctgtttcttcctctccaacccatttgtctcctcctcctcttgtcttccacctctctggttccctttcccttgtctcctctcttgctctctctcctgctctcttttcactcctscctctcctctgtcctctctctgcccccagctctgtcctaacacctgccagcctgacacatggcatccatacgagggatgctcaagaccgatggtaattgttctgggataaggaaatgagtatggggaaagaaagagccaaaatgctggagtatcatgtgcggctcttggcttctccagaatggctgggcataaaggggggaaaa

SEQ ID NO: 2913 - DNA, 21 bp, Homo sapiens
gttggggcaaacttggatctt

SEQ ID NO: 2914 - DNA, 22 bp, Homo sapiens
caattaccatcggtcttgagca

SEQ ID NO: 2915 - DNA, 409 bp, Homo sapiens
agagccctcggctgtgaagcttgagctctttcttttcagtcttcaaatatgatcatgccatgaagcagcacaaagcccaggaggagcccagtgaggctggaggggtccactggcagccactctcctccgtgcccctgtggtgttggggcaaacttggatctttctgaatcttttaactgtttccttctcttcccgtttttgtctsctggctgacttgtcctacactctactccttgcttatgatacttatttttccatccacagcaaaacaattcacatcaaggtaattgatgatgaggcatatgagaaaaacaagaattacttcattgagatgatgggcccccgcatggtggatatgagttttcagaaaggtgtagtaccctgtcctccacactaacactaacattct

SEQ ID NO: 2916 - DNA, 27 bp, Homo sapiens
attggaaactctctgtaatgtctatct

SEQ ID NO: 2917 - DNA, 23 bp, Homo sapiens
tgaagtgcagagtttgtatggaa

SEQ ID NO: 2918 - DNA, 430 bp, Homo sapiens
attggaaactctctgtaatgtctatctatccgtccatccatccatccatccatccatccatccatccatctctgcaacctgaacttttctttttttgtgagagaaaaaaaagaaagctctctcacccaggctgaagtgtagtagcatgatctcgactcactgcaacctttgcctcccaggctcaaatgattctcctgcctcagcctcccgagtagctgggattacaggcatgcgccactaaacccagctaatttttgtatttttagtcgagatggggttttgccatgttggcccggctagtctcaaactcgtgacctcaggtgatccgcctgctttggcctcccaaagtgctgggattacaggcatgagctaccatgcctggcctgccacctgatattttcaaatttttccatacaaactctgcacttca

SEQ ID NO: 2919 - DNA, 20 bp, Homo sapiens
gggtgagggagacaggaata

SEQ ID NO: 2920 - DNA, 20 bp, Homo sapiens
aacttcagggcacagcaatc

SEQ ID NO: 2921 - DNA, 123 bp, Homo sapiens
gggtgagggagacaggaatattcacaactccaattctctcttttttctaagtcaagagaagtaaatatatatatatatgcatgccagtagtctgggaataaatgattgctgtgccctgaagtt

SEQ ID NO: 2922 - DNA, 20 bp, Homo sapiens
cgctgctgctgcttacttac

SEQ ID NO: 2923 - DNA, 20 bp, Homo sapiens
gagaacgttgtctggcttcc

SEQ ID NO: 2924 - DNA, 280 bp, Homo sapiens
cgctgctgctgcttacttactacaggttctcctaagcctaaacaaggaagacaagagattgtttctcttttgagattgttatgggtcatgatatgaacaaaaaaaatacaactcttgtttttggaaactgcaggtctccttcaactgtgtgtatgtgtgtgtgtgtgtgcgcgcatgtgtgtgcgtgcgtgtgtgcgtgtgtgtttaatataactagggcttttagttcaccctccagagctaaccccttaagcctttcaggaagccagacaacgttctc

SEQ ID NO: 2925 - DNA, 22 bp, Homo sapiens
gctgagctccatctttcctttc

SEQ ID NO: 2926 - DNA, 22 bp, Homo sapiens
gtgcttccagcaaaatctctca

SEQ ID NO: 2927 - DNA, 642 bp, Homo sapiens
ctcctgatggaatgcacaggtaaatctccttggagagtaccagccaggaacagtccacagccaaggccaccgatcctcaccgctgagctccatctttcctttcaagctgtccttcccctcccctccccaccatcaccatagcaacacagtggtataaaaaaatgaaagcgctaaggcatctaaatatagtctgagtatcaactcttccagcatggagccgaaaacctagggaatgacagctagaggcatccagacgataactggcagccaggagggtggataagtcaaaggaaggggtcaaggaaagaggggaaggaaagggaaccatcacttgctgagcctgctgcctgtgctttctcatgtcacccgcacgacaacccaatgtgaatgttatcatctccaggtaactgctgaagaaacggaagctcaaagaggtaagagatttggccaaggtcacacagctataagcagtagaactaagattttaactcaagtttctatggccccagagtttatgtgtttctctctccataccacagggacaggtgcaagtgagagattttgctggaagcactgggctttttgagcaggccatataaaaattctgagcccagagctcaactaaattattggaagagactg

SEQ ID NO: 2928 - DNA, 22 bp, Homo sapiens
gctgagctccatctttcctttc

SEQ ID NO: 2929 - DNA, 22 bp, Homo sapiens
gtgcttccagcaaaatctctca

SEQ ID NO: 2930 - DNA, 655 bp, Homo sapiens
tttcaagctgtccttcccctcccctccccaccatcaccatagcaacacagtggtataaaaaaatgaaagcgctaaggcatctaaatatagtctgagtatcaactcttccagcatggagccgaaaacctagggaatgacagctagaggcatccagacgataactggcagccaggagggtggataagtcaaaggaaggggtcaaggaaagaggggaaggaaagggaaccatcacttgctgagcctgctgcctgtgctttctcatgtcacccgcacgacaacccaatgtgaatgttatcatctccaggtaactgctgaagaaacggaagctcaaagaggtaagagatttggccaaggtcacacagctataagcagtagaactaagattttaactcaagtttctatggccccagartttatgtgtttctctctccataccacagggacaggtgcaagtgagagattttgctggaagcactgggctttttgagcaggccatataaaaattctgagcccagagctcaactaaattattggaagagactgggccaaatataaggcttctatctaagcagcacctgtgtttctcaaggactgaggaaaatgaagggggagggttggcaaggctgcatttcccagggtgcgtgattatatggca

SEQ ID NO: 2931 - DNA, 755 bp, Homo sapiens
aagaataataaacaaatcctcaattcatgtccctcttcattctcaagtcctaaacacaacagagaatgcatttagaggagaggctgtggcaggtggggcttgcagtggattctggtttcatcttttccactttggtcttttgcgggatgaggagggaagctgtaaacttcagagaaaactgaggccttgaagaggggcaggtcaacaaagagataaacaaagataaacaaagagataaacagagtcttgtgagtaaaaaggggaccaacttgccaagccaagtgaggccctcgtagccatccttctgtgaggtaactgcatagaaatgtgggaaattaaacgtcctgaggaaggagctgcaggactgtgggctggccrctagagaggctcctgctgcctgacagtgtgaaggcaggacacagttctgcaagaaatgttgtgggggaccatgggctcaagggagatgcagcaatcaatacaaactaactgggaatatgggaagaagggcaatgcaacagagtcagaatgaaatttgtgaaaatcttgatcgtaaagatttttatgaatttagataccaccctcagaaaagcattttcctttaaaaaaaaaaaaaaaacacctctttgaagatgaatgaaatcccagcagcacatctgcagactgctttcagctcaacaatacaaagttactataaatggttctgtgtacagaatgtcatttaaaatgtgtgacaggccaacaacacgttactaatc

SEQ ID NO: 2932 - DNA, 982 bp, Homo sapiens
acagctccacccacttactagttatgtgaccttgagcaaattcctctatcactccacacctcagtttactcatgtatcaaatgggggtatttacagtactcagctcacagggatattgtaaagaataataaacaaatcctcaattcatgtccctcttcattctcaagtcctaaacacaacagagaatgcatttagaggagaggctgtggcaggtggggcttgcagtggattctggtttcatcttttccactttggtcttttgcgggatgaggagggaagctgtaaacttcagagaaaactgaggccttgaagaggggcaggtcaacaaagagataaacaaagataaacaaagagataaacagagtcttgtgagtaaaaaggggaccaacttgccaagccaagtgaggccctcgtagccatccttctgtgaggtaactgcatagaaatgtgggaaattaaacgtcctgaggaaggagctgcaggactgtgggctggccrctagagaggctcctgctgcctgacagtgtgaaggcaggacacagttctgcaagaaatgttgtgggggaccatgggctcaagggagatgcagcaatcaatacaaactaactgggaatatgggaagaagggcaatgcaacagagtcagaatgaaatttgtgaaaatcttgatcgtaaagatttttatgaatttagataccaccctcagaaaagcattttcctttaaaaaaaaaaaaaaaacacctctttgaagatgaatgaaatcccagcagcacatctgcagactgctttcagctcaacaatacaaagttactataaatggttctgtgtacagaatgtcatttaaaatgtgtgacaggccaacaacacgttactaatctaggactgcagattctcaaatccggttgtctgggtacaaaacctggctccactattaattagctggaggacctcaaatgagtttcccaacctctctgtgcctcagtt

SEQ ID NO: 2933 - DNA, 676 bp, Homo sapiens
aaaaatgtacagaaaggaaagctttggttctgagtttgcaggcttccctgtctttcattcctattgtagaaagcagcttatataaaaagatgtgctgtgtggccctttgagctgctgtgattgtgttaggaccccactggatggtattcgcatgaattaatctactgtagcatctctacaaatcaagaggctggcttctgtttgaaatgtcccaaggctttgtgcacagggcaagctaaatgtctccctacagtgagactgaaaatgccttgggtgcccttgtcgataggatctgatrtatagatgcatgtctacaattgcacagtggctgctggcaacatttattacaatctgaatgtgaaatggctattctgttcaaggattctgataaaaagtatcagccacagtagatgtataaggagcctggtttcactgcaactgactacagttatctgattttttttttctagttcatttttagtctgtggagcaaacagagatttcctccccaaatgatgtcctttctcagtcaccagggtgtggttatttggttttatgtagaggagatagaaaccaatcagtctaaatcatattctgttgaaatcagaaccaaaggatccacaatctagctccaatctaactttccagcctcaactcctacctgttctttgttact

SEQ ID NO: 2934 - DNA, 679 bp, Homo sapiens
aaaaatgtacagaaaggaaagctttggttctgagtttgcaggcttccctgtctttcattcctattgtagaaagcagcttatataaaaagatgtgctgtgtggccctttgagctgctgtgattgtgttaggaccccactggatggtattcgcatgaattaatctactgtagcatctctacaaatcaagaggctggcttctgtttgaaatgtcccaaggctttgtgcacagggcaagctaaatgtctccctacagtgagactgaaaatgccttgggtgcccttgtcgataggatctgatrtatagatgcatgtctacaattgcacagtggctgctggcaacatttattacaatctgaatgtgaaatggctattctgttcaaggattctgataaaaagtatcagccacagtagatgtataaggagcctggtttcactgcaactgactacagttatctgattttttttttctagttcatttttagtctgtggagcaaacagagatttcctccccaaatgatgtcctttctcagtcaccagggtgtggttatttggttttatgtagaggagatagaaaccaatcagtctaaatcatattctgttgaaatcagaaccaaaggatccacaatctagctccaatctaactttccagcctcaactcctacctgttctttgttactctt

SEQ ID NO: 2935 - DNA, 20 bp, Homo sapiens
tttctttggctgctttcaat

SEQ ID NO: 2936 - DNA, 22 bp, Homo sapiens
ggtgggagatagctaggtagga

SEQ ID NO: 2937 - DNA, 424 bp, Homo sapiens
tttctttggctgctttcaataataatgtgtatatatatacatgtatatgtacgtgtgtgtatatatatatatatatataaaacagagtctcactctgtttcccagtctggagtgcagtggcgtaatctcagttcactgcaacctccacctcctatgttcaagcaattctcctgcctcagcctcccaaggagctgagactacagtgcatgccaccacaactggctaatttttgtatttttggtagggatggggtttcaccatattggccaagctggtctcgaaaagtcctaacctgaggtgatctgcctgcctcagcctcccaaagtgctgagattacaggtttcagccaccatgtccagccacagcccaatattttaaaataaaaaataagaacaaaatatatcctacctagctatctcccacc

SEQ ID NO: 2938 - DNA, 19 bp, Homo sapiens
tcactgcatctggaagcac

SEQ ID NO: 2939 - DNA, 23 bp, Homo sapiens
ctaactaaatggcgagcattgag

SEQ ID NO: 2940 - DNA, 337 bp, Homo sapiens
  misc_feature 55: n = A,T,C or G
agctctcactgcatctggaagcaccatgttccttagagccaaagttctcaaactntgcttcctgctgggctccacagatccttcccgttccaccctgcacacaaacgtgcacacacatacacacacacacacacacacacacacacacagtgttctcaatgctcgccatttagttagtatgcaccaaatatgtgtagtatctggttccacccctggcctctcagacaattattagtatttttgggagcggggaggagagtcaggaagacccaagcgccatatttattatttccccagccaccccggcccaggctacatcccaagttcaaagtctatg

SEQ ID NO: 2941 - DNA, 21 bp, Homo sapiens
ttccttagagccaaagttctc

SEQ ID NO: 2942 - DNA, 20 bp, Homo sapiens
taactaaatggcgagcattg

SEQ ID NO: 2943 - DNA, 337 bp, Homo sapiens; identical to SEQ ID NO: 2940
  misc_feature 55: n = A,T,C or G

SEQ ID NO: 2944 - DNA, 20 bp, Homo sapiens
tttgggatgttctgtgtgga

SEQ ID NO: 2945 - DNA, 21 bp, Homo sapiens
gctccaaactcatgctagacc

SEQ ID NO: 2946 - DNA, 183 bp, Homo sapiens
tttgggatgttctgtgtggaggcatcagggggacataggtagaaagaacacaagcagttgtacacacacacacaaacacacacaattggttttctaggacacagtgaaatatagctttgctgtataaagtcattcaaggattgttctttcatgaaatacttgggtctagcatgagtttggagc

SEQ ID NO: 2947 - DNA, 22 bp, Homo sapiens
tttactggttcaaggacaatgg

SEQ ID NO: 2948 - DNA, 22 bp, Homo sapiens
tgagagcagaaatcacaggttc

SEQ ID NO: 2949 - DNA, 365 bp, Homo sapiens
tttactggttcaaggacaatggggagggctctgatgagctctgatgtcagacagacttggcctggcctgctctgccacttcctggctctgtgaccaggatcaggacactaaaactctatgactcagtttcctcctctgtacgatgggtagtaataaaccctacctcctaggattgctgggcatatcttgtgatatattgcatggatggcgcttagccaagggcctggaccataacgggtatttaataaatgtaaactaagcaaaaacaaacaaacaacaacaacaaacaaacaaacaaaaaaacgttcagagtagatgaccttcaaaattttcctgctcataagaacctgtgatttctgctctca

SEQ ID NO: 2950 - DNA, 20 bp, Homo sapiens
tccagtctgctgtagccatt

SEQ ID NO: 2951 - DNA, 22 bp, Homo sapiens
tttcttcaagcacatttcacaa

SEQ ID NO: 2952 - DNA, 184 bp, Homo sapiens
tccagtctgctgtagccattggaaacattacttcttcaatcaatcaaaacattgcttcttcaatcaatcaatcaatcaatcaataatagtaaagagtaacttaggggggcatcattgagccccacccattcttagatatacacagtcaacattttctcttacttgtgaaatgtgcttgaagaaa

SEQ ID NO: 2953 - DNA, 20 bp, Homo sapiens
gccaccctaagattcctcct

SEQ ID NO: 2954 - DNA, 21 bp, Homo sapiens
tcagcatgctaaggtcaaaga

SEQ ID NO: 2955 - DNA, 337 bp, Homo sapiens
gccaccctaagattcctcctacatagagaactgggaggcttctgaaatcaaggacctaatgaattcctttatttgcttagaactacatgaggagctgcagggagaatacaaagaaacccaaaattttgtcctgaggaacttagaatataaaggaagaaagaaaattctctctctctctctctctctctcacacacacacacacacacacacacacacacacacttagaacaaatttggggccctaatagtaagactgttcaaggggtgcccagagaatgaaaattccatgttcctcccacccttcccagctaggtctctttgaccttagcatgctga

SEQ ID NO: 2956 - DNA, 20 bp, Homo sapiens
ttgcaatggcactaatgagg

SEQ ID NO: 2957 - DNA, 20 bp, Homo sapiens
ttggacatgctgtcttctgg

SEQ ID NO: 2958 - DNA, 158 bp, Homo sapiens
ttgcaatggcactaatgaggggcgccaagacaagcactcaaggcagctggttttaaagcagatggaaggaaagaaggaaggaaggaaggaaggaaaagagggagggagggagggaagaaggaaggaaggaagacaggcccagaagacagcatgtccaa

SEQ ID NO: 2959 - DNA, 21 bp, Homo sapiens
gtgtgccactctgtcaatcaa

SEQ ID NO: 2960 - DNA, 20 bp, Homo sapiens
cagatctgtctgcccaggat

SEQ ID NO: 2961 - DNA, 230 bp, Homo sapiens
gtgtgccactctgtcaatcaatcttataccctctccccacaagacaacatagaaaacaggcaaacaacaacaacaacaaaacaacaacaacaagttcagtctttttttttttccctctcccttctaacccccaggagggctggaaagaccaagggatttagccatgagaagaaaggggagctctctcagcctcctacacacccaagaaaaatcctgggcagacagatctg

SEQ ID NO: 2962 - DNA, 21 bp, Homo sapiens
gtgtgccactctgtcaatcaa

SEQ ID NO: 2963 - DNA, 20 bp, Homo sapiens
cagatctgtctgcccaggat

SEQ ID NO: 2964 - DNA, 230 bp, Homo sapiens; identical to SEQ ID NO: 2961

SEQ ID NO: 2965 - DNA, 19 bp, Homo sapiens
tggtggatcacgaggtcag

SEQ ID NO: 2966 - DNA, 20 bp, Homo sapiens
caggcccaaaggaataattg

SEQ ID NO: 2967 - DNA, 337 bp, Homo sapiens
tggtggatcacgaggtcaggagatcgagaccatactggctaacatggtgaaaccccatctctactaaaaaaaaaaagtataaatatatattagccggacgtggtggtatatatatatataaatataaatatatatgtataatatatatatattaggcctagctactcgggaggctgaggcaggagaatggcgtgaacccgggaggcagagcttgcagtgagccgagatgtgccactgcactccagcctgggcgacagagcgagactccatctcaaaaaaaaaaaaaaaaaaaaaaaaaaaaaagtctacatagccttcaattattcctttgggcctg

SEQ ID NO: 2968 - DNA, 2055 bp, Homo sapiens
ggctattgctgcatttccatccccagtattcccagctatttcaagccatttttcaacggagtctccaccagatggtttggaggacagagcagctatttgtgcctcccattgacatctatttttccaagtgagagactgccccatatgttagtgcaatatgtcactggaggtgaagcatcagttgtattggtgggaacctgccgtttgctgtcccctttttcctcatgccttttcctgcctctctgatcttttctaggtctctggcctatcaggaggacaactggtgctgcaatagaagccagtggctaagtctcgtgtatggcgtggttaaggttgcagcctctcacctctgccttcctccattttgggctggttacctttgtgctcttcctgaatggtcttcgagcagaggctggtggctcaggggacgtgccaagcacagggcagaacaatgagtcctgttcagggtcatcggactgcaaggagggtgtcatcctgccaatctggtacccggagaacccttcccttggggacaagattgccagggtcattgtctattttgtggccctgatatacatgttccttggggtgtccatcattgctgaccgcttcatggcatctattgaagtcatcacctctcaagagagggaggtgacaattaagaaacccaatggagaaaccagcacaaccactattcgggtctggaatgaaactgtctccaacctgacccttatggccctgggttcctctgctcctgagatactcctctctttaattgaggtgtgtggtcatgggttcattgctggtgatctgggaccttctaccattgtagggagtgcagccttcaacatgttcatcatcattggcatctgtgtctacgtgatcccagacggagagactcgcaagatcaarcatctacgagtcttcttcatcaccgctgcttggagtatctttgcctacatctggctctatatgattctggcagtcttctcccctggtgtggtccaggtttgggaaggcctcctcactctcttcttctttccagtgtgtgtccttctggcctgggtggcagataaacgactgctcttctacaaatacatgcacaaaaagtaccgcacagacaaacaccgaggaattatcatagagacagagggtgaccaccctaagggcattgagatggatgggaaaatgatgaattcccattttctagatgggaacctggtgcccctggaagggaaggaagtggatgagtcccgcagagagatgatccggattctcaaggatctgaagcaaaaacacccagagaaggacttagatcagctggtggagatggccaattactatgctctttcccaccaacagaagagccgtgccttctaccgtatccaagccactcgtatgatgactggtgcaggcaatatcctgaagaaacatgcagcagaacaagccaagaaggcctccagcatgagcgaggtgcacaccgatgagcctgaggactttatttccaaggtcttctttgacccatgttcttaccagtgcctggagaactgtggggctgtactcctgacagtggtgaggaaagggggagacatgtcaaagaccatgtatgtggactacaaaacagaggatggttctgccaatgcaggggctgactatgagttcacagagggcacggtggttctgaagccaggagagacccagaaggagttctccgtgggcataattgatgacgacatttttgaggaggatgaacacttctttgtaaggttgagcaatgtccgcatagaggaggagcagccagaggaggggatgcctccagcaatattcaacagtcttcccttgcctcgggctgtcctagcctccccttgtgtggccacagttaccatcttggatgatgaccatgcaggcatcttcacttttgaatgtgatactattcatgtcagtgagagtattggtgttatggaggtcaaggttctgcggacatcaggtgcccggggtacagtcatcgtcccctttaggacagtagaagggacagccaagggtggcggtgaggac

SEQ ID NO: 2969 - DNA, 22 bp, Homo sapiens
tctcaagagagggaggtgacaa

SEQ ID NO: 2970 - DNA, 22 bp, Homo sapiens
atcatctctctgcgggactcat

SEQ ID NO: 2971 - DNA, 409 bp, Homo sapiens
tgaaactgtctccaacctgacccttatggccctgggttcctctgctcctgagatactcctctctttaattgaggtgtgtggtcatgggttcattgctggtgatctgggaccttctaccattgtagggagtgcagccttcaacatgttcatcatcattggcatctgtgtctacgtgatcccagacggagagactcgcaagatcaarcatctacgagtcttcttcatcaccgctgcttggagtatctttgcctacatctggctctatatgattctggcagtcttctcccctggtgtggtccaggtttgggaaggcctcctcactctcttcttctttccagtgtgtgtccttctggcctgggtggcagataaacgactgctcttctacaaatacatgcacaaaaagtaccgc

SEQ ID NO: 2972 - DNA, 22 bp, Homo sapiens
ctggaggtgaagcatcagttgt

SEQ ID NO: 2973 - DNA, 23 bp, Homo sapiens
ggagtatctcaggagcagaggaa

SEQ ID NO: 2974 - DNA, 603 bp, Homo sapiens
ctggaggtgaagcatcagttgtattggtgggaacctgccgtttgctgtcccctttttcctcatgccttttcctgcctctctgatcttttctaggtctctggcctatcaggaggacaactggtgctgcaatagaagccagtggctaagtctcgtgtatggcgtggttaaggttgcagcctctcacctctgccttcctccattttgggctggttacctttgtgctcttcctgaatggtcttcgagcagaggctggtggctcaggggacgtgccaagcacagggcagaacaatgagtcctgttcagggtcatcggactgcaaggagggtgtcatcctgccaatctggtacccggagaacccttcccttggggacaagattgccagggtcattgtctattttgtggccctgatatacatgttccttggggtgtccatcattgctgaccgcttcatggcatctattgaagtcatcacctctcaagagagggaggtgacaattaagaaacccaatggagaaaccagcacaaccactattcgggtctggaatgaaactgtctccaacctgacccttatggccctgggttcctctgctcctgagatactcc

SEQ ID NO: 2975 - DNA, 22 bp, Homo sapiens
ctggaggtgaagcatcagttgt

SEQ ID NO: 2976 - DNA, 23 bp, Homo sapiens
ggagtatctcaggagcagaggaa

SEQ ID NO: 2977 - DNA, 409 bp, Homo sapiens
tgagtcctgttcagggtcatcggactgcaaggagggtgtcatcctgccaatctggtacccggagaacccttcccttggggacaagattgccagggtcattgtctattttgtggccctgatatacatgttccttggggtgtccatcattgctgaccgcttcatggcatctattgaagtcatcacctctcaagagagggaggtgacrattaagaaacccaatggagaaaccagcacaaccactattcgggtctggaatgaaactgtctccaacctgacccttatggccctgggttcctctgctcctgagatactcctctctttaattgaggtgtgtggtcatgggttcattgctggtgatctgggaccttctaccattgtagggagtgcagccttcaacatgttcatcatc

SEQ ID NO: 2978 - DNA, 20 bp, Homo sapiens
gactgccaagggataatgga

SEQ ID NO: 2979 - DNA, 20 bp, Homo sapiens
catccaacaaggactgctca

SEQ ID NO: 2980 - DNA, 256 bp, Homo sapiens
gactgccaagggataatggagaaaggaaaaattgggagagaggagagaatcttggagtggaagtggaagaggggccatgtagaggtagtgagacctagagagctctgtgtgaaagaagctgaaagaggaaagacttaaggagctaatggtcaatattatctggtgcagggagagagagagagaaagagggaggacagcgggcagctctttggaataagtcattatattttggggaatgagcagtccttgttggatg

SEQ ID NO: 2981 - DNA, 20 bp, Homo sapiens
ctgcagtctgcgtttctgat

SEQ ID NO: 2982 - DNA, 20 bp, Homo sapiens
agccactgggaaagatgatg

SEQ ID NO: 2983 - DNA, 377 bp, Homo sapiens
ctgcagtctgcgtttctgataaattgaaaccagttttaattcttctgcccgggagacctaaccgccgaatgcgttcggaggtatgttttttaatcgccaggaaagggggagagagagagaaagagagagagagagagagaggaaaggaggagagaagagaagagaagcggggggcggggggagagagagagagagagagaaggaagctgcgatgagcgggtaaatttatggtactgcattaaaggcatttcttctatttaaccccaccccgccaccaccaccactaccacaccgttaaaaataaaatacaatgaattaagacgaagaactgcttttttccccggagcaaattgctttcatcatctttcccagtggct

SEQ ID NO: 2984 - DNA, 20 bp, Homo sapiens
gaatgcgttcggaggtatgt

SEQ ID NO: 2985 - DNA, 21 bp, Homo sapiens
ccataaatttacccgctcatc

SEQ ID NO: 2986 - DNA, 165 bp, Homo sapiens
gaatgcgttcggaggtatgttttttaatcgccaggaaagggggagagagagagaaagagagagagagagagagaggaaaggaggagagaagagaagagaagcggggggcggggggagagagagagagagagagaaggaagctgcgatgagcgggtaaatttatgg

SEQ ID NO: 2987 - DNA, 20 bp, Homo sapiens
caccaccaccactaccacac

SEQ ID NO: 2988 - DNA, 20 bp, Homo sapiens
aggagggtttctccagtgct

SEQ ID NO: 2989 - DNA, 340 bp, Homo sapiens
caccaccaccactaccacaccgttaaaaataaaatacaatgaattaagacgaagaactgcttttttccccggagcaaattgctttcatcatctttcccagtggctcgggtcctctgggcaggtcagccagggcctgtaggagcagcagcgctagcctctgaatcagggctttgactgtgtgtgtgtgtgtgtgtgtgtgtgtgtgtgtgtgtgtgtccgcgcgcgcgtgtgtgttgggggatcgggggagggttagttatatatttcgattctctccaccgagtcccggatcacgcagaccaccaggggctggagagtgcagcactggagaaaccctcct

SEQ ID NO: 2990 - DNA, 20 bp, Homo sapiens
caccaccaccactaccacac

SEQ ID NO: 2991 - DNA, 20 bp, Homo sapiens
aggagggtttctccagtgct

SEQ ID NO: 2992 - DNA, 340 bp, Homo sapiens; identical to SEQ ID NO: 2989

SEQ ID NO: 2993 - DNA, 19 bp, Homo sapiens
gcagcgctagcctctgaat

SEQ ID NO: 2994 - DNA, 20 bp, Homo sapiens
ttctggtgctgtgagtgtcc

SEQ ID NO: 2995 - DNA, 377 bp, Homo sapiens
gcagcgctagcctctgaatcagggctttgactgtgtgtgtgtgtgtgtgtgtgtgtgtgtgtgtgtgtgtgtccgcgcgcgcgtgtgtgttgggggatcgggggagggttagttatatatttcgattctctccaccgagtcccggatcacgcagaccaccaggggctggagagtgcagcactggagaaaccctccttctccctcgcccccttggccccagcggtgggtgctctggggctgcagctcccgacccgcggcggtggagtcccgagattggggtgagcgcgtgcgtgcgtatgtgcacgcgggcgcgcgccgagtggataacgcgcttccctgctagcccccaaacccggcggacactcacagcaccagaa

SEQ ID NO: 2996 - DNA, 22 bp, Homo sapiens
ggtttccctctttctgaaatcc

SEQ ID NO: 2997 - DNA, 25 bp, Homo sapiens
actgcatacacaatgtacactttcc

SEQ ID NO: 2998 - DNA, 20 bp, Homo sapiens
catgttcaaccaacgctgtc

SEQ ID NO: 2999 - DNA, 21 bp, Homo sapiens
gggattggtctgtaccagaaa

SEQ ID NO: 3000 - DNA, 264 bp, Homo sapiens
catgttcaaccaacgctgtcggcagagctgacttgcgtaggttcctctgagttctaggtagactgaaatagcaaagcccagctctgcattctgagcctcagtgtcctcaccagtaaaatgggaataataataattattattattaataataataataattattattattattattaattattattattaataataataatacccacctcgtgaggttgttgtgaagcttcagtgagattacagtttctggtacagaccaatccc

SEQ ID NO: 3001 - DNA, 441 bp, Homo sapiens
cataaaagagtctgtctagttcttaccaagctctgtgactgggctgaatcctgtagcttctcgggtcctgagtttcttcccaacttgaaaatgaggtttgtggctcttgctcccaatgctgatgttacacagcttrctttccatcttccttgtgaacatctccttgggttccagtacagctagatataagtaacaatggcagaaatgcaagtacggtgtcattacatttaatgttttccaaccctgtatgcatgtagtggggagaaaaaaagaagtgagaatgtccagagttgaaagcagtctgagacttcataggccacgtgaaggttggctgtagaacttaagatgggagagaagcagggttgggggagaacaaaagtaggggagaaggagaattgatatatatttggggattggtctgtaccagaaactgtaatctca

SEQ ID NO: 3002 - DNA, 255 bp, Homo sapiens
cataaaagagtctgtctagttcttaccaagctctgtgactgggctgaatcctgtagcttctcgggtcctgagtttcttcccaacttgaaaatgaggtttgtggctcttgctcccaatgctgatgttacacagcttrctttccatcttccttgtgaacatctccttgggttccagtacagctagatataagtaacaatggcagaaatgcaagtacggtgtcattacatttaatgttttccaaccctgtatgcatgt

SEQ ID NO: 3003 - DNA, 801 bp, Homo sapiens
cttggccacaatataggccaataaatcaatgaaacagaatccaaagttgattcaagtaaatatgagtcttagtatctgacaaagtgggaaaggatgatgtatttagtaaatcatgctgacagaattggcatgtgaaggaaggcagaccagacccctgcatcataccatgctcaaaaaattctagatgaagtaaaaatctaaatgtaaaatataaaataatagaatgaattttagaaaaatatttttgtaaatttaaaattttgtaaattgaaagtgggaagaccttaagcaaaaggatcctcccccagagcctttggaaaggactgccgtcctggtagtaccttggttttaggccagggagacctgtgttgaacttctaacctgtaaaacytaatgaatttgcattgctttaagccattgagtttgttgaaatttgtttcagcagccatagaaaactattaaaatgtattaagtatgttaattccctcatttgaaaatccgactttaccaatgttacacaaacttgtccagagaataaagataaaacacttcctaactcttctgatgaagccagaaaaccctgataccaaaatcggataaggacattacaaaaaaagaaaattattggccaatctctgctatgaatgtagatacagaagtcctttacaatttaatagctaaccaaattcagtaatacacttaaaaagataattcaacacaaccaatatgactttattccaggaatgtaaagttggttagtcattagaaaatgagttaattataatttatcactttaacagg

SEQ ID NO: 3004 - DNA, 725 bp, Homo sapiens
tcccccagagcctttggaaaggactgccgtcctggtagtaccttggttttaggccagggagacctgtgttgaacttctaacctgtaaaacytaatgaatttgcattgctttaagccattgagtttgttgaaatttgtttcagcagccatagaaaactattaaaatgtattaagtatgttaattccctcatttgaaaatccgactttaccaatgttacacaaacttgtccagagaataaagataaaacacttcctaactcttctgatgaagccagaaaaccctgataccaaaatcggataaggacattacaaaaaaagaaaattattggccaatctctgctatgaatgtagatacagaagtcctttacaatttaatagctaaccaaattcagtaatacacttaaaaagataattcaacacaaccaatatgactttattccaggaatgtaaagttggttagtcattagaaaatgagttaattataatttatcactttaacaggttaagtagaaatttcatacagtcatctcaatagatgcaaagaaagcatttgatgaagttctgttcatcaaaagacacaataaaaggaatgaaaaggcaagcaaaaaagtttatgactaaaataagagaaaccttaagaaactaggaagagaagggaacttccttaatttgataaagatattctaaaaaaataacaaatatcatatttaatgggaaaatattgaa

SEQ ID NO: 3005 - DNA, 22 bp, Homo sapiens
cccaattcataagacctcatcc

SEQ ID NO: 3006 - DNA, 20 bp, Homo sapiens
tatgccatgatgggcagttt

SEQ ID NO: 3007 - DNA, 203 bp, Homo sapiens
cccaattcataagacctcatccaaagtagataggggagactcagacttggggactggtttttagagcaaattattatacttggtgtgtagctgtcagtcagacttgtttcagtgcataacacatgctgaggaacacacacacacacacacacacacacacacacacggcattcaaagcatttaaaactgcccatcatggcata

SEQ ID NO: 3008 - DNA, 21 bp, Homo sapiens
agtgcataacacatgctgagg

SEQ ID NO: 3009 - DNA, 20 bp, Homo sapiens
tatgccatgatgggcagttt

SEQ ID NO: 3010 - DNA, 93 bp, Homo sapiens
agtgcataacacatgctgaggaacacacacacacacacacacacacacacacacacggcattcaaagcatttaaaactgcccatcatggcata

SEQ ID NO: 3011 - DNA, 20 bp, Homo sapiens
ctggactcccgatcacattt

SEQ ID NO: 3012 - DNA, 20 bp, Homo sapiens
gctgcccttcagaaaagttg

SEQ ID NO: 3013 - DNA, 204 bp, Homo sapiens
ctggactcccgatcacatttgtgagttgctgatcagctctggaactgcctacttcaggaatccttcttaaggaaaaaaaaaaagagagagagagagagaatttcttacagcttaagaaactcttttttggaggtaaacctgtcttaatggacacaggccattggtggtcaataaaggaaaagcccaacttttctgaagggcagc

SEQ ID NO: 3014 - DNA, 20 bp, Homo sapiens
gggacacagccataccagaa

SEQ ID NO: 3015 - DNA, 24 bp, Homo sapiens
gaaggcagaaagcaatattgtaaa

SEQ ID NO: 3016 - DNA, 309 bp, Homo sapiens
gggacacagccataccagaacaaaataaattaatacatatatgttttatataataatgtattattatacatatatattatatataattagaattagcacaattatgttgtattactttaacaaaaatatgaaaatcaatgttatttgaaattatgcatcattgtgtattacttttctattatataatgctattatttaaacaaaacaacaataggactagttgatagaattagtagtaataggactaattaaataaatcatatgtaagaaaaataaaacaatatttttacaatattgctttctgccttc

SEQ ID NO: 3017 - DNA, 24 bp, Homo sapiens
tttctgcttcctttaccataatcc

SEQ ID NO: 3018 - DNA, 20 bp, Homo sapiens
ctaagagcggagctgcaagt

SEQ ID NO: 3019 - DNA, 132 bp, Homo sapiens
tttctgcttcctttaccataatccttgtctgaactgcttgtagcatttagagcatgcttcttttcttttgtgtaatatcagtactgagcagtgaaacataaaattcactttgacttgcagctccgctcttag

SEQ ID NO: 3020 - DNA, 25 bp, Homo sapiens
ggcaacatagtgagaatctatcaac

SEQ ID NO: 3021 - DNA, 21 bp, Homo sapiens
tttgacctggaacatcacctc

SEQ ID NO: 3022 - DNA, 415 bp, Homo sapiens
ggcaacatagtgagaatctatcaacacaaaatataaagaaattagctaggcatggtggcacgtgcctgtagtcctagctattcaggaggctgaggcaggaagctcaattgaggccaggagttcaagaccaatctgagcaggatagcaagaccccatctctaaaaaaatttaaaaatcagcctggtgtaatatagtgtgtccctatagatccagctacttgggaggctgaggcaggaggatcacttgagaccaggagctggaggttacagtaagtcatgactgtaccactgcacaccagcctgggtgacagagtgacggtgtgtgtgtgcgtgtgtgtgtgtgtttgtgttttaaaaacttttctcttgtttttagggcttgtcatatgcaacaagaggtgatgttccaggtcaaa

SEQ ID NO: 3023 - DNA, 20 bp, Homo sapiens
gacacccattgtccatagcc

SEQ ID NO: 3024 - DNA, 20 bp, Homo sapiens
ccaaaggactcctcccttct

SEQ ID NO: 3025 - DNA, 168 bp, Homo sapiens
gacacccattgtccatagccttctcggggcagagtgggctggttgtgttgacaatgaaacagtgttggtttgcaaacaaacaaacaaaaagaagatagggatcaggatagaagggaggtgagaatcagaggcataaactgaggtagacagaagggaggagtcctttgg

SEQ ID NO: 3026 - DNA, 20 bp, Homo sapiens
gacacccattgtccatagcc

SEQ ID NO: 3027 - DNA, 20 bp, Homo sapiens
ccaaaggactcctcccttct

SEQ ID NO: 3028 - DNA, 168 bp, Homo sapiens; identical to SEQ ID NO: 3025

SEQ ID NO: 3029 - DNA, 20 bp, Homo sapiens
aaagtcaaagcatgcaacca

SEQ ID NO: 3030 - DNA, 20 bp, Homo sapiens
tgaagaggtaagccctgctc

SEQ ID NO: 3031 - DNA, 223 bp, Homo sapiens
aaagtcaaagcatgcaaccaccatgctctgaaagaaagtcagatgatgggatgatctgtgcagcaaaccaccgtgacagtgtttacctatgtaatgaacctgcacgtcctatcctgcacatgtaccgctgaccttaaaataaaagttggaaatcaagaataaaaatttaaatgagggaaaaaaagaaaagaatcagagaccaagagcagggcttacctcttca

SEQ ID NO: 3032 - DNA, 22 bp, Homo sapiens
aggtgctcaaagaacaaagaag

SEQ ID NO: 3033 - DNA, 21 bp, Homo sapiens
gggtctctctaccttccctca

SEQ ID NO: 3034 - DNA, 102 bp, Homo sapiens
aggtgctcaaagaacaaagaagactttgtgaagaaaagaaaagggttttgggtttgtttgtttgtttgtttggggtttttttgagggaaggtagagagaccc

SEQ ID NO: 3035 - DNA, 2001 bp, Homo sapiens
gaagccataccttgtcatgcatccgcctccggatttgacccaccaggcacttgcatcagcaggaacgaaaataagttcagataattttgcacaaactagatgctgatatacccagcaatcagatggcttagttcacgtggccagggtttggaagactggagcaaagggatgtcagttctgtgcccaaactgttcagaaaacagtaagggttaatgacaataagacacagtttgaaagaaagtctgtagtggaggatcagagggagaattgaatagactgagacagtctccagtcagctttttcaataggtgctcaaagaacaaagaagactttgtgaagaaaagaaaagggttttgggtttgtttgtttgtttgtttggggtttttttgagggaaggtagagagacccagttcctgttatactaacaatgtacaccctgtcttgggccccaacaccgcagagaagtcccatgaggactggggaaactaccatgttcatttacacatctctcattggtccagagttgttttcagatgcattaactccttcctgtttccagcctgctccatgaatgcactgagcacaccccctcccccataaagtagaaagcctttagtgtgtagatctcctgtactacagaaaacctcaaggttcggtctaagaggatacaggtgcgtaccaccagcatcttctgtaccagactttccagtcccaaatacttttaattttactctcatttccctaggattgtattttccaaataaaccatttagatttattccttgcttcagcatatgttttctaaggaacctgggtacagtagatgctgaaagcccaccctccatcttcttgtcccacttgagttcacttgcagccacagtagacaatctccatgctctgagagtttaccacttcaagtgcttatatctcagatattcttttccttacagctttctcctgaaccatggaatattaatcaaaggtgtgtttcacatgacttctcagaaagcctacagggatgactcaagtagtacacagagaaaacttgttcattagtctgccctgttttgtgcttccccagaaaactaactccacctaaatccttgtctctgggtctgctttttgggcaatccaaattaaaacaggaggtaagactctatgcttcttataaaaaggttaattctacccaccaatcctgatataattaactgatatagctctaattaactcaacaaatataaaataactatacatcttttcttaaaataagaatattgcaaaatgcactgcttcctgtaaaaatttacaagtaaaataaggtgactctaacaaattaactttaacatacaatacaggataccaatttgccagcaaagcactgataaaggatttattgtatgaagtgtaacaggacaacaggctacccatttggaaaagtatacaattagatacctatctcattccttatagcaaaataaattccacaattaagcataaaagctgaaaccaacataatcccagaaaaaatggattatttcaatgtaatctcaagcagaaatacaaaactcagcaaatataacagaacaataggctgacaaatattactataatcaacttcaatggtttcttttatatatactttaagttctgggggtacatgtgcagaatgtgcagttttcttacattggtatacacgtgccatagtagtttgctgcacccatcaacctgtcacctacattaggtatttctcgcaatgaaatccttcccctagccctccatcacccaacagacccagtatgtgatgttcccctccctgtgtccaggtgttctcgttgttcaactcccacttgtgagtgagaacatgcagtattttgttttctgttcctgtgttagtttgctgaaaatgatggtttccagcttcatccatgtccctgcaaaggacatgtactcatccttttttatggctgcatagtattccatggtgtatatgtgccacatttt

SEQ ID NO: 3036 - DNA, 20 bp, Homo sapiens
ccacagtggcagtgatgttt

SEQ ID NO: 3037 - DNA, 20 bp, Homo sapiens
ttggtgcagtgaaagatggt

SEQ ID NO: 3038 - DNA, 149 bp, Homo sapiens
ccacagtggcagtgatgtttgttattgcagatctccttcatattgcaggtctcaggaaggcagatgtgtgacaagacagacagactgacacttcttgtggatgcagatctttcctgggccacacacagtaccatctttcactgcaccaa

SEQ ID NO: 3039 - DNA, 22 bp, Homo sapiens
actgtggcccatgagttaggtc

SEQ ID NO: 3040 - DNA, 23 bp, Homo sapiens
tctcccacaaaagacatcagaga

SEQ ID NO: 3041 - DNA, 674 bp, Homo sapiens
actgtggcccatgagttaggtcatacgttaggtatgcagcatgatgaagaattctgtttttgtggggaaagagttgcatcatgaatacttttagagtgccagcagagaaattcaccaattgcagttacgctgattttatgaagaccaccttaaaccagggatcatgtctgcataatcctccaagattgggggaaatctttatgctaaagcgctgtgggaatggtgtggttgaaagagaagagcagtgtgactgtggatccgtacagcagtgtgaacaagacgcctgttgtctgttgaactgcactctaaggcctggggctgcctgtgcttttgggctttgttgcaaagactgcaagttcatgccatcaggggaactctgtagacaagaggtcaatgaatgtgaccttccagaatggtgcaatggaacatctcatcagtgtccagaagatagatatgtgcaggacgggatcccctgtagtgacagtgcctactgctatcaaaagaggtgtaataaccatgaccagcattgcagggagatttttggtaaagatgcaaaaagtgcatctcagaattgctataaagaaatcaattctcagggaaaccgttttggtcactgtggtataaatggcacaacatacctaaaatgtcatatctctgatgtcttttgtgggaga

SEQ ID NO: 3042 - DNA, 20 bp, Homo sapiens
ttgccctgagtcaagtttcc

SEQ ID NO: 3043 - DNA, 20 bp, Homo sapiens
gctttctgggaagaggttca

SEQ ID NO: 3044 - DNA, 143 bp, Homo sapiens
ttgccctgagtcaagtttccttatactctcttcttataccttctcttgtgctttctggagtcttcctttaaacacaaaagggaagagacagagagagagagagagagagaaccaactccaccctgaacctcttcccagaaagc

SEQ ID NO: 3045 - DNA, 20 bp, Homo sapiens
ttgccctgagtcaagtttcc

SEQ ID NO: 3046 - DNA, 20 bp, Homo sapiens
tccttgtggtgcatgtgact

SEQ ID NO: 3047 - DNA, 985 bp, Homo sapiens
  misc_feature 488: n = A,T,C or G
tataaatatgaagggattaaattttttgatgtttatggtgttttcaaccttttaatatttataatttgttgcagcttctttcttatgctaaataaatcctcattttcatacttattttctgcaattgtaacttggtattatttttcttaaagtggggccctcatcttgtacgtgcatcaggcccaaaaacttaatttcacctctgactgtgatcaacatattgatgaaggtaggtgccgttttttataagaacaaaaaggaaaagcatttaaatcaagctaatctaagaggacttacacagaagatataaaaatgaacatgcctgacccaacactaatcatctcctggattttgaatccatttctaatcaatgctttctttgccctgagtcaagtttccttatactctcttcttataccttctcttgtgctttctggagtcttcctttaaacacaaaagggaagagacagagagagagagagagaganaccaactccaccctgaacctcttcccagaaagctccctacgtctacttatcttattaaacctgagctttaatagaatttactgcttgcctaaaggcctcctcttgagaaaccccatcctcagaagtcacatgcaccacaaggaccagagttcctgttctccacagccgacaacatcaacaccaaatcatttatcctgcaatatctgactacactattttttagatgtctcttcaaccacccttatcacacttggacaaaattcaaaggctttggaccctgactaataaaattattctccaccaaaaattctaccctcatcttaaagtaatattagcaagtatatagaaaacccatctgaaaacaagacagggttttttcaagtttttttttaaacctcttcaatttgtcttagtgtaattcagcctacccactcatagtcaaaatctataccttgtcaacgcacaaaaaatttcatatatcctaagcaatttaccaa

SEQ ID NO: 3048 - DNA, 2001 bp, Homo sapiens
ttcacctctgactgtgatcaacatattgatgaaggtaggtgccgttttttataagaacaaaaaggaaaagcatttaaatcaagctaatctaagaggacttacacagaagatataaaaatgaacatgcctgacccaacactaatcatctcctggattttgaatccatttctaatcaatgctttctttgccctgagtcaagtttccttatactctcttcttataccttctcttgtgctttctggagtcttcctttaaacacaaaagggaagagacagagagagagagagagagagaaccaactccaccctgaacctcttcccagaaagctccctacgtctacttatcttattaaacctgagctttaatagaatttactgcttgcctaaaggcctcctcttgagaaaccccatcctcagaagtcacatgcaccacaaggaccagagttcctgttctccacagccgacaacatcaacaccaaatcatttatcctgcaatatctgactacactattttttagatgtctcttcaaccacccttatcacacttggacaaaattcaaaggctttggaccctgactaataaaattattctccaccaaaaattctaccctcatcttaaagtaatattagcaagtatatagaaaacccatctgaaaacaagacagggttttttcaagtttttttttaaacctcttcaatttgtcttagtgtaattcagcctacccactcatagtcaaaatctataccttgtcaacgcacaaaaaatttcatatatcctaagcaatttaccaacaattttagttctcccagctctcccccttacttctgctatacctatttctcaaacccgaagagaacccacttttgtctttcattgtctcccatttcactcaatgttcttgtcttccaatccattcgagctctgctactagtttcatcccttcaagcactgtatgccaaaatctttaactctctaaagtcctaattataacacagattgtcgggggtgggggtgggggatgggcaggaactgcattaatccttcacatgctttttccacttctacatcaaagctaccaatgctactctgaaaaaaaaaaaaatcacaaaccaatgtgtttgtgaaaggtttaaaaagagaatatacaaatcagaactgaaatggcttgtcctggatccccagcctaaggaatagagatataaaattcaacagatatgtcaaaacttcctatgccatattgcccttttctttattctcctgggcattgcattcctcgtttatgtatcgtgttctgagtttcctcaatgttctgagttttcctcatttatgtatagtgccagtagctgaaaatccattctcattgtctttcaatcacagtagagttagttaaacaagtacctttcctttctaataaaaagtatttaaggtttttttcttttcttgtcctagactggctatgtggatgctggaagatggggaaaacttgtttcaagctgaacattatccttgccattagcttgcctaaagaggctggattcatctgggcagttttcactgctgcaagttaggcaccttatttcgcaaggtgcaagtagcgtggaagagaaaagcaaagttcatagacagaacttccaagaacaaagatctctgaattgggatgaaattctaactgccagatttgctccctgtgtctctcttgatatgttttctacttattatggagtgacagttgttgtggatgggaggattgaaaatgggaagaactaatcaaagatataatgttgtggaaaggactgataagctacacaaacctgtgtcatattattctttttcttggagctcagcatgagagcaggcaataacaggagaataacttcaaaaaaatctttaaaaccagactcattgtcttcattcctaggacttacagagaccaaagctcctgaagtaccatcattctaccatggatactgtgaagtggtaccaccgtaaatctatgtcctc

SEQ ID NO: 3049 - DNA, 20 bp, Homo sapiens
acccgaagagaacccacttt

SEQ ID NO: 3050 - DNA, 20 bp, Homo sapiens
gggcaatatggcataggaag

SEQ ID NO: 3051 - DNA, 997 bp, Homo sapiens
  misc_feature 501: n = A,T,C or G
ttctaccctcatcttaaagtaatattagcaagtatatagaaaacccatctgaaaacaagacagggttttttcaagtttttttttaaacctcttcaatttgtcttagtgtaattcagcctacccactcatagtcaaaatctataccttgtcaacgcacaaaaaatttcatatatcctaagcaatttaccaacaattttagttctcccagctctcccccttacttctgctatacctatttctcaaacccgaagagaacccacttttgtctttcattgtctcccatttcactcaatgttcttgtcttccaatccattcgagctctgctactagtttcatcccttcaagcactgtatgccaaaatctttaactctctaaagtcctaattataacacagattgtggggggtgggggtgggggatgggcaggaactgcattaatccttcacatgctttttccacttctacatcaaagctaccaatgctactctgaaaaaaaaaaaantcacaaaccaatgtgtttgtgaaaggtttaaaaagagaatatacaaatcagaactgaaatggcttgtcctggatccccagcctaaggaatagagatataaaattcaacagatatgtcaaaacttcctatgccatattgcccttttctttattctcctgggcattgcattcctcgtttatgtatcgtgttctgagtttcctcaatgttctgagttttcctcatttatgtatagtgccagtagctgaaaatccattctcattgtctttcaatcacagtagagttagttaaacaagtacctttcctttctaataaaaagtatttaaggtttttttcttttcttgtcctagactggctatgtggatgctggaagatggggaaaacttgtttcaagctgaacattatccttgccattagcttgcctaaagaggctggattcatctgggcagttttcactgctgcaagttaggcaccttatttcgcaaggtgcaagtagcgt

SEQ ID NO: 3052 - DNA, 21 bp, Homo sapiens
tcgtgttctgagtttcctcaa

SEQ ID NO: 3053 - DNA, 20 bp, Homo sapiens
cagcatccacatagccagtc

SEQ ID NO: 3054 - DNA, 184 bp, Homo sapiens
tcgtgttctgagtttcctcaatgttctgagttttcctcatttatgtatagtgccagtagctgaaaatccattctcattgtctttcaatcacagtagagttagttaaacaagtacctttcctttctaataaaaagtatttaaggtttttttcttttcttgtcctagactggctatgtggatgctg

SEQ ID NO: 3055 - DNA, 20 bp, Homo sapiens
cttgcacacacagtgccaaa

SEQ ID NO: 3056 - DNA, 20 bp, Homo sapiens
tgggagagatgactggaacc

SEQ ID NO: 3057 - DNA, 255 bp, Homo sapiens
cttgcacacacagtgccaaaaattggggtgtaagtacgtttaaggccacaatgtcacaatataaaatggatttctttctctggaatttatatatatatattccaaattcaaagacaaaatggtttctgggcctttcaccatctgaaaccacctatatttgcctcttctttacctcactccctctccagtctcagtggaaatgtgatcctccccgattcaggtagtagcccctcatggttccagtcatctctccca

SEQ ID NO: 3058 - DNA, 658 bp, Homo sapiens
gggatccatcatattaaaacggcacttaggagctgggtgaggcagtgaggaggacaatggaaagactgagcagcaagaagagaggagggtgaggtgggaacccacatggctgagtggaaaaagttaactgaactgccttggaaataggctccacatatttttggatcaagccttagtgttctatctcgtgtgtttgacagagcggattatgttttaacttttcttcctctacctgacaaagttattttgaggaataatcatgaaatgaaacaaataattaatggccaggaaactttaagtagtgaacattttctttyactaacccttatatggtcatgtcagtaaaaataaataaatgaaaataaacatgccatttcagattaggaagagtgaatttttttcattgacctttccatatacaatcataccactgcaaaagtttttaaaaataaaaagtaaaatgaataagaatagtaccaaatagggtagtgaaaaggtaataaattcttattaaatatattaatatatatttttaaaagacataggaaaacttacttcatattgtgtccggaattggtggcttcttggtctcactgacttcaagaatgaagccgcgaaccctggtggtgagtgttacagttcttaaaggcggtgtgtg

SEQ ID NO: 3059 - DNA, 24 bp, Homo sapiens
ttcactcttcctaatctgaaatgg

SEQ ID NO: 3060 - DNA, 20 bp, Homo sapiens
ccttggaaataggctccaca

SEQ ID NO: 3061 - DNA, 259 bp, Homo sapiens
ttcactcttcctaatctgaaatggcatgtttattttcatttatttatttttactgacatgaccatataagggttagtgaaagaaaatgttcactacttaaagtttcctggccattaattatttgtttcatttcatgattattcctcaaaataactttgtcaggtagaggaagaaaagttaaaacataatccgctctgtcaaacacacgagatagaacactaaggcttgatccaaaaatatgtggagcctatttccaagg

SEQ ID NO: 3062 - DNA, 658 bp, Homo sapiens; identical to SEQ ID NO: 3058

SEQ ID NO: 3063 - DNA, 22 bp, Homo sapiens
ggtccaagctgtctaaatcaca

SEQ ID NO: 3064 - DNA, 20 bp, Homo sapiens
accttgaagcagttgattgg

SEQ ID NO: 3065 - DNA, 390 bp, Homo sapiens
ggtccaagctgtctaaatcacaaagggaggggaggacatctataaatccaaccaattggccgggcacggtgactcaagcctgtaattccagcacttagggaggctgaggcacgcggatcacgaggtcagtagatagagaccatcctggccaacatggtgaaaccccgtctctactaaaaatacaaaaattagctgggtgtggccgtgcgcgcctgtagtcccagctactcgggaagctgaggcaggaggatggcgtgaacccgggaggccgagcttgtagtgagccgagatcgtgccactgtactccagcctgggtgacagaaaaagactgtcaaaaatgataataaatatatatatatataaataaaatccaatcaactgcttcaaggt

SEQ ID NO: 3066 - DNA, 22 bp, Homo sapiens
gaaggaaacaaagtcccattga

SEQ ID NO: 3067 - DNA, 20 bp, Homo sapiens
ctgagatcatgccaatgcac

SEQ ID NO: 3068 - DNA, 408 bp, Homo sapiens
gaaggaaacaaagtcccattgataagtcaacaataaaaacaatagcagaatgaaacttacaaataattctgctgcccctattatcagatagaatattataaaaatatgttttataatttcaacaagagagtattggaggttattagtaacaaacaataacaatggctagacagtttttttgaaaatcaaatagaacttgaattgtacatatataatcaatgtgtacatttaaataatatataaatatatatacattcaatatacatagaaacaaaaaatgaaaatgtgtaatggcagattatatacaactaaaaacaaaattagtaaactgacacatagttcttctttttttcttgagacggagtctcacgctgtcgcccaggctgaagtgcattggcatgatctcag

SEQ ID NO: 3069 - DNA, 22 bp, Homo sapiens
gctgaattctcaacaacaatgg

SEQ ID NO: 3070 - DNA, 26 bp, Homo sapiens
tttcttccttctccaatattacatca

SEQ ID NO: 3071 - DNA, 260 bp, Homo sapiens
gctgaattctcaacaacaatggtactgtcaagacagtaaaatcatactttcaaaatctgaaatgcaagcctagaattgagtgcctaggaaaataaaccctcactttaaaaaaggaaaaggtggtgaaataaaaccttttcagacaaacaaaaataaacaatttactaccaacagactatcagtgaaaggattctaaagggtatatttcacacacacacaaaattaaacccattatgatgtaatattggagaaggaagaaa

SEQ ID NO: 3072 - DNA, 741 bp, Homo sapiens
ctccaaaatacagaggaaacctgacgcaaagctaaactttctatctagatgggacttttgggttgcctttttcgaggtgagtgttctgcatgggagaaggtgactcaaaactttggtgagcagaatggcatcttctgtggtagacattacatcttttcaccaatatttcaagttttcttccccttccactcacacaagaagattgaacttccctggctcccatgaatttgggtgtgatcatggaacttttgttcaatgaaatttgagcagaagtgacccaagtctcttctaggcagacacacttaagtgccactgcaaactctgttctctctttctgctactacaactggtgatgctcccacatgctggatcctccatccrcctatatattatagaggaaaaatgggaactttgttggtctaagctactgagaatttgaaattgtgtattcccagtgaataatatagcttatcctaataaatactggtatacaagttaaaatacatagggaagtaacttaaaaggatatagaacataattccaaatgcttagagaagaaaaggaatttaaaaatttaaagagcaatcaagaaggcacaatagaagaaaatgaatgcaggaagcaatatacaaagaacagcaaataatatggtagaaatacatttaaatatattatcctgactttataaggtcagaatcataagtcatctgcaaatatcagtgacttatggaatccagggtt

SEQ ID NO: 3073 - DNA, 1001 bp, Homo sapiens
gtgagccatgatcatgtcactgcactccagcctgagtgacaaagtgagaccttgtctcaaaaaacaaacacacaccatatcaagatctgatgtagagactgttgtgcatcctctatatttctccaaaatacagaggaaacctgacgcaaagctaaactttctatctagatgggacttttgggttgcctttttcgaggtgagtgttctgcatgggagaaggtgactcaaaactttggtgagcagaatggcatcttctgtggtagacattacatcttttcaccaatatttcaagttttcttccccttccactcacacaagaagattgaacttccctggctcccatgaatttgggtgtgatcatggaacttttgttcaatgaaatttgagcagaagtgacccaagtctcttctaggcagacacacttaagtgccactgcaaactctgttctctctttctgctactacaactggtgatgctcccacatgctggatcctccatccrcctatatattatagaggaaaaatgggaactttgttggtctaagctactgagaatttgaaattgtgtattcccagtgaataatatagcttatcctaataaatactggtatacaagttaaaatacatagggaagtaacttaaaaggatatagaacataattccaaatgcttagagaagaaaaggaatttaaaaatttaaagagcaatcaagaaggcacaatagaagaaaatgaatgcaggaagcaatatacaaagaacagcaaataatatggtagaaatacatttaaatatattatcctgactttataaggtcagaatcataagtcatctgcaaatatcagtgacttatggaatccagggtttatttctcacatcacacggtagtcttcagttagctttagctattcaatctgggacacaacgaaagagcagcctcagtgtggaatactgcaggtattgtggcagagaacaactcagcttttgaatgttgattcaaaagcct

SEQ ID NO: 3074 - DNA, 18 bp, Homo sapiens
cagcctggtgacagagca

SEQ ID NO: 3075 - DNA, 20 bp, Homo sapiens
ccagtcggtggatcaaaaat

SEQ ID NO: 3076 - DNA, 140 bp, Homo sapiens
cagcctggtgacagagcaagactccatctcaaaaaaaaaaaaaaaaaaaaaaaaaaaaatatatatatatatatatatatatatttatatacatagacaatgaaatacaaatgtatatcaatttttgatccaccgactgg

SEQ ID NO: 3077 - DNA, 23 bp, Homo sapiens
cattgttggcacaaattaaatga

SEQ ID NO: 3078 - DNA, 21 bp, Homo sapiens
ccacttggcacataatcaaca

SEQ ID NO: 3079 - DNA, 279 bp, Homo sapiens
cattgttggcacaaattaaatgaaaacttgttcatcactctaatatttaataaagtcttctgtacacacacacatacacaaaaacacacacacaaaaaaaacacatacaaacacatgcataaacacagacacaaacacaaacatgtaaacacacacagacccttttgagagggctgttttgagtggaaagaaaagaggctgagttcaacatctgttttaatgcataataatcacctcagcataataataatgttaacatgttgattatgtgccaagtgg

SEQ ID NO: 3080 - DNA, 19 bp, Homo sapiens
ggcccatccagaaattcac

SEQ ID NO: 3081 - DNA, 20 bp, Homo sapiens
aagaggaagctggctggaac

SEQ ID NO: 3082 - DNA, 260 bp, Homo sapiens
ggcccatccagaaattcacagaaatcttagggagggatttagaatttctgcagtttaggaatggtggtttaaatcagtcttagccatgttttaaaaatcaccccaacttgttcattcatatttcctctgacacacacacacagttccaagttccttcatttccatctgagagttcataaacaaagagaaagctgagtacctatacttcataaacacctccccattctacccagagctctggttccagccagcttcctctt

SEQ ID NO: 3083 - DNA, 20 bp, Homo sapiens
tccctacctctcctcagcaa

SEQ ID NO: 3084 - DNA, 20 bp, Homo sapiens
catacacgcacagccatttc

SEQ ID NO: 3085 - DNA, 256 bp, Homo sapiens
tccctacctctcctcagcaagctttcctgccctagtgtcacttgccttctttctcctgcctaagaggagtgcagaatcttcctataggcagcactcatacgcagggcatccaggaaacaaacaacaacaacaacaacaaaaaaacatgagaaaggagtggcagcatctggaaacattttcacctaaactccagtttcacttctgtaaggctctggccaagtggatctctgtcaatcgaaatggctgtgcgtgtatg

SEQ ID NO: 3086 - DNA, 20 bp, Homo sapiens
tccctacctctcctcagcaa

SEQ ID NO: 3087 - DNA, 20 bp, Homo sapiens
catacacgcacagccatttc

SEQ ID NO: 3088 - DNA, 256 bp, Homo sapiens; identical to SEQ ID NO: 3085

SEQ ID NO: 3089 - DNA, 20 bp, Homo sapiens
gggatgttctcagcgacaag

SEQ ID NO: 3090 - DNA, 18 bp, Homo sapiens
ttagccaggcatggtggt

SEQ ID NO: 3091 - DNA, 241 bp, Homo sapiens
gggatgttctcagcgacaagtatgctctgaacacacacacacacacacacacacacacacacacacatatatgtaaattcatgtgtatactttcattaactcttttgagacagagtcttgctgtgtagcccaggctggagtgcagtggtgtgatcatagctcactgcagcctcaacttccccaggctctagcgatcctcccacttcagcctcccaagtagcgcaccaccatgcctggctaa

SEQ ID NO: 3092 - DNA, 20 bp, Homo sapiens
gcttgttggaaggcagtttc

SEQ ID NO: 3093 - DNA, 20 bp, Homo sapiens
tggcagagtacaggctcctc

SEQ ID NO: 3094 - DNA, 809 bp, Homo sapiens
  misc_feature 434: n = A,T,C or G
catgaatttcctcaacttcaaaatgcagctctagtgaaatcaggttcatgacgttttccccattcttcagacaatgtaaattactctctcctcagagcctttgactcctatatctagaaaggcacttatagtctataaacacttttaacgtataaattggtgctttgactaaagtataagcaatatgaagacaggaaagaatcttcctctttgaatcgccagcatctagaaaagtccctagcatatggcaagtgtttgatgaatgtcctttgagtgaatgatgatgtagatgattttaataaaagtgttctgtgccagtgccttgatcgagatggtgctgtgaatgagttttgaggtatattttgcttgttggaaggcagtttctttcctgtttaggaaaaaaagcaacggtaatgagccaaaaaaaaaaaaanggtgaactgaggtgttaagccctctggctctgtgttgcccactagaggagcctgtactctgccaagcagggcctgtttaacatccttggagtggctctcttgaagtaggcacactttctagggcacaaaaattgacaatcactgcaaaaaagcttattacatgttgggaaacatttctggaatttctgcatgggattattcaaaacaagcctctccatagctgactcgctagctgtttgtttgtttttagtgaaagaaaatttgttagaaaagtaaagggataaagaatggctactccataggcagagcagcccctagctggtttttaactttccttctcctgctgcttgtgacacatctccatatttcatttgt

SEQ ID NO: 3095 - DNA, 20 bp, Homo sapiens
ctcggtgcatgggagtaaat

SEQ ID NO: 3096 - DNA, 21 bp, Homo sapiens
cagctacaaatcctcctgctg

SEQ ID NO: 3097 - DNA, 247 bp, Homo sapiens
ctcggtgcatgggagtaaatatgcccccttcaggtgtggcacagacttgagacttatgctgaggtcaggcctcacagctgcctcccaaggctactgtcccagatggccccttcccacacaccggccaccatggagggattagcatgcacgtgtgtgtgtgtgtgtgtgtgtgtgtatgtttgtgtctttgtgtcagtatttctgtgaaggaggcagtccaagggaccagcaggaggatttgtagctg

SEQ ID NO: 3098 - DNA, 20 bp, Homo sapiens
caccatggagggattagcat

SEQ ID NO: 3099 - DNA, 20 bp, Homo sapiens
gtgtctgagctgggctcttc

SEQ ID NO: 3100 - DNA, 373 bp, Homo sapiens
caccatggagggattagcatgcacgtgtgtgtgtgtgtgtgtgtgtgtgtatgtttgtgtctttgtgtcagtatttctgtgaaggaggcagtccaagggaccagcaggaggatttgtagctggtgtgtgtgtgtgtgtgtgtatgtttgtgttttgtgtcagtatgtctgtgaagcaggcagtccaagggaccagcaggaggatttgattattactgcctagagacatctgacgcaggggagccctggtttcttgtggttgatatacctgggcaaggaaaagggagctgagaagcaatcagagaaagttgagcaaaaaggatgaaggcaggaggaaatagctgaaagaagacagaagagcccagctcagacac

SEQ ID NO: 3101 - DNA, 20 bp, Homo sapiens
ccagcaggaggatttgtagc

SEQ ID NO: 3102 - DNA, 20 bp, Homo sapiens
ccctgcgtcagatgtctcta

SEQ ID NO: 3103 - DNA, 139 bp, Homo sapiens
ccagcaggaggatttgtagctggtgtgtgtgtgtgtgtgtgtatgtttgtgttttgtgtcagtatgtctgtgaagcaggcagtccaagggaccagcaggaggatttgattattactgcctagagacatctgacgcaggg

SEQ ID NO: 3104 - DNA, 20 bp, Homo sapiens
caaactcccagtttcccaag

SEQ ID NO: 3105 - DNA, 18 bp, Homo sapiens
ggtgtgcgcctgtagtcc

SEQ ID NO: 3106 - DNA, 403 bp, Homo sapiens
caaactcccagtttcccaagtgccctgctttttaggccccattgaatcaaatgatatgccaacactcagttctaccctttatactccatgaaacacccagtcctgggctgatgcctcttatgaaactgaccagtagggttggagcactatttctcattatctctacctctttgctgtagtatgattaggacagtcaagcagcaaacaaggaaactctcagtgtacttccacacttaggagtgagtgtttgtttgtttgtttgtttgtttgagatggagtctcgctctgtcgcccaggctggagtgcagtggcacgatcttggctcactgcaacctctgcctcctgggttcaagcgatttttctgcctcagcctcccgagtagctgggactacaggcgcacacc

SEQ ID NO: 3107 - DNA, 676 bp, Homo sapiens
tgctacagttgtaatcgaggacctatcggatactttctactcatttattcattgagttagttgtgtcctaatcaaagccacaggctcttatactaatatttatactttaattttttgtggttctatagaaaatcaaagactccaagtttgatgactggaagaatattcgaggacccaggccttgggaagatcctgacctcctccaaggaagaaatccagaaagccttaagactaagacaacttgactctgctgattcttttttccttttttttttttttaaataaaaatactattaactggacttcctaatatatacttctatcaagtggaaaggaaattccaggcccatggaaacttggatatgggtaatttgatgacaaataatcttcactaaaggtcatgtacaggtttttatacttcccagctattccatctgtggatgaaagtaacaatgttggccacgtatattttacacctcgaaataaaaaatgtgaatactgctccaaaaacagagtcacgtattccactctccaactacccacatattccttttgcaatagccattagggcatcattttgatatttcattctgatttctgattctctgatttctgattcctaatgaggacagtaggtctggatccaaattctcacagtaaaatcaagcagtaattt

SEQ ID NO: 3108 - DNA, 819 bp, Homo sapiens
agcctccgagtagctgggactgcgggcacgcaccaccacgcctggctacttttttcattttttgcagagatgaggcttcaccatattgcccaggctggtcctgaactcctgattcaagtgatccaccaaccttggcctcccaaagtgctgggattaacacatgtgaaccaccatgcccggccccagaagataatttgaaagtcaattttttctaaatcaagtacctaagagctaaggtggacatttcttggtgccatttttctgtttagcattgatatactatagaaagcacgatccttggtaaaatttaacagtatacayaggaggtcaacaaacctggtaccagtcccccttttgttcacccataggatattttagtagttctaacctctgaatcagaaaaatgtcactttagtcagtttcatagagcaatcaagagaacaatatgataatgcatgttctcactggtatggtatacacaagctaactcagcagctctattttagactgagtatagtgttgtattttggggagatgagtaaacttatgattgatttataagtacttgcctgcctcatcgtggacctgtgagattcagtcttcatatctgttttcacattcctgtctccaccatgcccaatctaatttcttgtttgcgtattgtgcagtatgctccgttttggttatttaactccttaatccagttgtatgtgtccttccatatgtcattaaagtaacagagtcatttagctttccttttcagtgatgtctgaatcatactggcactgatattataattgttctcattttcattatcta

SEQ ID NO: 3109 - DNA, 999 bp, Homo sapiens
ggttttacattttctgtggtttcattaaaatcttcaaagaaatcagaagataatttggctttttgggtctcttgtttttttgagacagggtctcgctctgtcacccaggctggagtgcaatggcacgatcacagctcactgcagtctcaaactcctgagctaaatcaatcctcccagatcagcctccgagtagctgggactgcgggcacgcaccaccacgcctggctacttttttcattttttgcagagatgaggcttcaccatattgcccaggctggtcctgaactcctgattcaagtgatccaccaaccttggcctcccaaagtgctgggattaacacatgtgaaccaccatgcccggccccagaagataatttgaaagtcaattttttctaaatcaagtacctaagagctaaggtggacatttcttggtgccatttttctgtttagcattgatatactatagaaagcacgatccttggtaaaatttaacagtatacayaggaggtcaacaaacctggtaccagtcccccttttgttcacccataggatattttagtagttctaacctctgaatcagaaaaatgtcactttagtcagtttcatagagcaatcaagagaacaatatgataatgcatgttctcactggtatggtatacacaagctaactcagcagctctattttagactgagtatagtgttgtattttggggagatgagtaaacttatgattgatttataagtacttgcctgcctcatcgtggacctgtgagattcagtcttcatatctgttttcacattcctgtctccaccatgcccaatctaatttcttgtttgcgtattgtgcagtatgctccgttttggttatttaactccttaatccagttgtatgtgtccttccatatgtcattaaagtaacagagtcatttagctttccttttcagtgatgtctgaatcatactggcactgatattataattgttctcattttcattatcta

SEQ ID NO: 3110 - DNA, 815 bp, Homo sapiens
acctgtactccactgccagagagttagttctaaaatgaaacactgaccatgtgcccaataatccctctaccttatagaatataagtcatttctatcatttagctaattcctactcattcttaaagcctaattcaaaggctaatgcctttagaaaactttctctgattctccttttccaagttaaaactatacacctctccttgaacgtctagtaatggcattttactggcattgctatattatatgtctgggtacatttttttaattagctgtcttccagcctcaattataaactttataagtactagtttctgaatactttacttgcagcatctaacaagtattaacacatgaccactattcaattatttttcaaatatatacttattttctcccttccaaatgtcatatactaccataattttcatcttaaagggaaaaagaaaaaaattccttgataaaataattgggatgctaaytgaaagcttttaacacagttaaattgaaagttgctaactgaaaattaagtaaaattcctcattaaataaaattgttctaatccttcatagaaagtacacatttttttaaatttaaaatttaccctaatacctactgtccttaaaactagctgatgttggtttctctaaaaccataaaattaactgaggaaactgaataggactttatactctacttttctatcaatattactgaggtctgctaataaaatacatatattacttgagaaaaaaactacaaatatcagatatgtgccataaacaaaagctatgtacttctgaatgaaaaaaccagagt

SEQ ID NO: 3111 - DNA, 514 bp, Homo sapiens
acctgtactccactgccagagagttagttctaaaatgaaacactgaccatgtgcccaataatccctctaccttatagaatataagtcatttctatcatttagctaattcctactcattcttaaagcctaattcaaaggctaatgcctttagaaaactttctctgattctccttttccaagttaaaactatacacctctccttgaacgtctagtaatggcattttactggcattgctatattatatgtctgggtacatttttttaattagctgtcttccagcctcaattataaactttataagtactagtttctgaatactttacttgcagcatctaacaagtattaacacatgaccactattcaattatttttcaaatatatacttattttctcccttccaaatgtcatatactaccataattttcatcttaaagggaaaaagaaaaaaattccttgataaaataattgggatgctaaytgaaagcttttaacacagttaaattgaaagttgct

SEQ ID NO: 3112 - DNA, 20 bp, Homo sapiens
gggttatgcctggtgtagga

SEQ ID NO: 3113 - DNA, 21 bp, Homo sapiens
caggcagtaagtgttgcagtg

SEQ ID NO: 3114 - DNA, 120 bp, Homo sapiens
gggttatgcctggtgtaggaagttaggggagttttgtgcaggactatgcatagagtgtgtgtgtgcgtgtgtgtgtgtgtgtgtgtggtgtttgaattgcactgcaacacttactgcctg

SEQ ID NO: 3115 - DNA, 20 bp, Homo sapiens
acctccagaaacccaggaac

SEQ ID NO: 3116 - DNA, 18 bp, Homo sapiens
ccaccatgcctggctaat

SEQ ID NO: 3117 - DNA, 231 bp, Homo sapiens
acctccagaaacccaggaacggtgcatctctcccatcttatttacttccttttgatatttcaaaattcatgcagaccaggcatggtggctcatgcctgtaatacctgcagtttgggaggctgaggcaggaggatcatttgagcccaggagttcgagaccagcctgagcaacaaagcaagaccccatctttacaaataataataataataataaattagccaggcatggtgg

SEQ ID NO: 3118 - DNA, 701 bp, Homo sapiens
acaacgcctggctaatttttgtatttttagtagacacggggtttcagcatcttggccaggctggtcttgaattcctgacctcgtgatccacccatctcggcctcccaaagtgcagaaccagattcttaactgccacagactcttgtattatgtaatttatatacagaacacaaagcacttgatttgcttaactgatgtacttgatgatactataaaacctatattatgagaaagcattgctccttcaaaggaatcaagtgatagcaaacactcggtcctgtttccaggttttcctcactgttcattttgcctttgttcttgcaggsggagaatgaaaggggcgagagctaaagtgtgttgtcaatgcaagtcaatccttaaccaacaataatttacaaaagaactttatatttgctgtaatcattaaatttagttactaatcccaggaaaagggttagtccttcctcctagtttgtagatttgcaaatggagatgaataattgaatcctattttaatcttttatctgcagtaatctgggcttcttattaccggatatatttgcattttacctccaggccatgttagttcttagaagattattttcctcatgaaccctgttttgttttgcttcctttctgcttcaattctaatgtcacattgcatacctggatgtaaacagcagtcagtttctcagatcaaa

SEQ ID NO: 3119 - DNA, 101 bp, Homo sapiens
  misc_feature 72: n = A,T,C or G
tcctgtttccaggttttcctcactgttcattttgcctttgttcttgcaggsggagaatgaaaggggcgagantaaagtgtgttgtcaatgcaagtcaatca

SEQ ID NO: 3120 - DNA, 20 bp, Homo sapiens
ttgatgcaccaactgaaaca

SEQ ID NO: 3121 - DNA, 20 bp, Homo sapiens
caggctgcacacagatcaat

SEQ ID NO: 3122 - DNA, 346 bp, Homo sapiens
ttgatgcaccaactgaaacactcactaatcatacattttgctggaggttgatcaatccttagcaaatcaggaagaaatgaatgttccacttacttcgtgcagaagctcaggaagctgggctctaaaggcccaagtttttgttgttgttgttgttgttgttgttttgcctgaagcaatgtatgtaatttaataatttaaatagtgtttaattaaatagtgtcttgtttaaatgctatataacattttcaactgcggctgcacaccagaatcactcaatgaactttattttactgctgcttgagtcccaccctcagaggttccttttaattgatctgtgtgcagcctg

SEQ ID NO: 3123 - DNA, 20 bp, Homo sapiens
ttgatgcaccaactgaaaca

SEQ ID NO: 3124 - DNA, 20 bp, Homo sapiens
caggctgcacacagatcaat

SEQ ID NO: 3125 - DNA, 346 bp, Homo sapiens; identical to SEQ ID NO: 3122

SEQ ID NO: 3126 - DNA, 894 bp, Homo sapiens
tgttaaaatgtgtttcctatttcctgccttatgaaatcagctgagttaaaattagttttctttgattaagaattttgaattgcctcaggatattctaaaacaagatctctgacttgtaaatgtagagacatagagaaagaatgggctcaatttaatacgcaatagatgtgagaatatactctggatattgtaattttttactaagatcctgcaatgaaccacattttttggtctcttttttcatcaatttttgaagaaaccataaaaatagattatttagatccaatccaaaaaagtcagtgtgttataatgcaggggttaattcacggaactaacttattagatgcttactcagggccaggtacaggactagatgctggagataaagagatgataaggcaaagatccttccctggaggtattttatttaaagaatgctgctgtatatttcaacatctctgcagctgattggatgrgggtttctgctgggtctttctcactgatttctaaggtaagcgcagagaccagtgtttcatttcctttgtaactttcccatagcacttggcacagtgctctgaaggccattaagtacaatagttgataaatgttgatgactaaccaactctttcattcaccaaattaaaaactgtactcacacagaatatgaaatgaagctggctaatggctcaatctgtgccattttgttatataaggggtttgttccatgttaaaatggaacattcaactgtgtagtatgaccagctacgtcacccttagcttaataaaaatgtcatgttcactgaggaatgactattcttcacctcccttcatttaggcagacacacaaggaatgagaaacttagttcacttttctaaaaataaaaattaaattat

SEQ ID NO: 3127 - DNA, 597 bp, Homo sapiens
tgttaaaatgtgtttcctatttcctgccttatgaaatcagctgagttaaaattagttttctttgattaagaattttgaattgcctcaggatattctaaaacaagatctctgacttgtaaatgtagagacatagagaaagaatgggctcaatttaatacgcaatagatgtgagaatatactctggatattgtaattttttactaagatcctgcaatgaaccacattttttggtctcttttttcatcaatttttgaagaaaccataaaaatagattatttagatccaatccaaaaaagtcagtgtgttataatgcaggggttaattcacggaactaacttattagatgcttactcagggccaggtacaggactagatgctggagataaagagatgataaggcaaagatccttccctggaggtattttatttaaagaatgctgctgtatatttcaacatctctgcagctgattggatgrgggtttctgctgggtctttctcactgatttctaaggtaagcgcagagaccagtgtttcatttcctttgtaactttcccatagcacttggcacagtgctctgaaggccattaagtacaatag

SEQ ID NO: 3128 - DNA, 20 bp, Homo sapiens
tagatgccactgtcgttgga

SEQ ID NO: 3129 - DNA, 20 bp, Homo sapiens
taggctttccctccctttct

SEQ ID NO: 3130 - DNA, 152 bp, Homo sapiens
tagatgccactgtcgttggagacatactgctgatctgtcccaccgacgatgttgaagcccagccctgagaaaatcatggaggagtaaaaagatgggggtgaagaagaaagaaagagattagagaagatgaagagaaagggagggaaagccta

SEQ ID NO: 3131 - DNA, 24 bp, Homo sapiens
aacctgagaggaacatactgatga

SEQ ID NO: 3132 - DNA, 20 bp, Homo sapiens
tagacacccagcaacccatt

SEQ ID NO: 3133 - DNA, 241 bp, Homo sapiens
aacctgagaggaacatactgatgataacagtgtactttggagctaaagggtataattaattcagctcttagcatttaaggtccaaaaggagttgaggggagaggcaggaagaaaaaagactgggattcaacttttttttttttttttttagtgaatgaatgaagagcttagtgagctctggttataatgtgccaacaaattttaaaatatggcaagattaaaatgggttgctgggtgtcta

SEQ ID NO: 3134 - DNA, 20 bp, Homo sapiens
cctcacaaacaatgcacagc

SEQ ID NO: 3135 - DNA, 20 bp, Homo sapiens
gcccacagaatgggagatag

SEQ ID NO: 3136 - DNA, 398 bp, Homo sapiens
cctcacaaacaatgcacagctaccccaatgatatgtgtgtatgtatgtatgtatgtgtgtatatgtatgtatatatatgtatatttatatatatatgtatgtgtatatatatatgtatgtatgtaaaatagtcatcctaatgggtgtgaagtggtaacaaattgtggttttgatttgcatttccctaacagctagtgatgttaaatatttttttcatgtgcttattggccattggccatttgtattaccttctttggagaaatgtctactcaggtcctttgctcatttttgaattgggttgttttctgtcactaagctgtaaaagttctttatatatgctggatattaacttcttagcaaataaataattggcaaatactatctcccattctgtgggc

SEQ ID NO: 3137 - DNA, 20 bp, Homo sapiens
agggtgagaccctgtcagtc

SEQ ID NO: 3138 - DNA, 21 bp, Homo sapiens
gccaacttgatcactcacaaa

SEQ ID NO: 3139 - DNA, 385 bp, Homo sapiens
agggtgagaccctgtcagtcaatcaatcaatcaaatcaatcaatgataggaaagaaggaaatgtaaatttctgtcttaaggtagaatgccaatatcagaaagtcagtataggacaaaactaaagatttaaacaggttgtagaatgtctacggaaaaaaataaatgaatgaatgaatgataatggggaaataaatgtataataaatttctgtcctaaggtagaatgccaatatcaaaaaggaagtataggacaaaactgaaggtttgaacaggttgtattaggttggtgcaaaagtaatggcaaaaactgcaattacttttgcaccaacctaatagaagttttgtggaacatgaatcttatgaattttgtgagtgatcaagttggc

SEQ ID NO: 3140 - DNA, 19 bp, Homo sapiens
agcatgcaccaccaaacac

SEQ ID NO: 3141 - DNA, 20 bp, Homo sapiens
gggtcagaactgctggtttc

SEQ ID NO: 3142 - DNA, 332 bp, Homo sapiens
agcatgcaccaccaaacacagctaatgttttgttttgttttgctttgttttgttggcagagatgggagtcttgctatgttgcccaggctggtcttgaacttctggcctcaagcagtcctcctccttgatctcccaaagtgctcggattacaggcaagagccacaatgcctggcttgaactgcaaaattcttaaaaatggggatcatttcttattctttattctagtgtccatgattcctaatcatagtgtaggcacataataaatgctaaataaattttaaaaaatagttttactttacttttcagtcttctgaaaccagcagttctgaccc

SEQ ID NO: 3143 - DNA, 23 bp, Homo sapiens
ggcagtcaacttcttaaacatgg

SEQ ID NO: 3144 - DNA, 21 bp, Homo sapiens
ttgtctttccggtagtgtgct

SEQ ID NO: 3145 - DNA, 403 bp, Homo sapiens
ggcagtcaacttcttaaacatggctactgcagtggaaagtagtatatggtatagcagaattaacacacctgggttaaaaatcctttgaaatttactggcattagaaactgggcaagtccttaacctccccaaggcaatttcccaatctaataatgtggattaaatatttattactcagggttgctgtgaagattaaatgagtatgtatgtatgtatagtatatatacagtatatatatgtatgtatagtatatatacagtatatatacagtatatatgtatgtatagtatatatacagtatatatatgtatgtatagtatatatacagtatatatatgtatgtatagtatatatacagtatatatatgtatatatagtaactagcacactaccggaaagacaa

SEQ ID NO: 3146 - DNA, 27 bp, Homo sapiens
gacacaaagtatggataattctgaaag

SEQ ID NO: 3147 - DNA, 26 bp, Homo sapiens
aatggataaatagctaaactgacaca

SEQ ID NO: 3148 - DNA, 637 bp, Homo sapiens
  misc_feature 388: n = A,T,C or G
gcacagtggctcacacccgtaatcccagcactttgggaggcagaggtgggtggatcatttaaactcaggagtttaaatgagaccagcctgggcaacgtagtgaaacatcgtctctaccaaaaatacaaaaaaattagccgggcgtggcagtgcacacccatggtatcggttactcaggaggctgaggtgggaggattgcttgagcctaagagggagaggctgcagtgggctgagatcgtgccactgcactctagcctgggcaacagagtgagaccctgtctcaaaaaaaaaaaaaagaaaagaaaaagaaagaaagaaaagaaaagaagacacaaagtatggataattctgaaagttatattttataaagaataatctatccatgatntaagctactgcagaactgcagatgagaaaaggtgatggactgtcctaggtagtggcaagggaaacaggagtgaaagaatttcaggaacatttcagagatggagctcagagtacttgatgatttattagagactcttggaatacagtattagtaggatttactgtgtcagtttagctatttatccattaacagtaacaatagtaggaaacacatactgtttaccataggtcaagcaatgttgtaaacatt

SEQ ID NO: 3149 - DNA, 20 bp, Homo sapiens
taatgtcaagagcccggttt

SEQ ID NO: 3150 - DNA, 20 bp, Homo sapiens
catctgcagggatttggatt

SEQ ID NO: 3151 - DNA, 142 bp, Homo sapiens
taatgtcaagagcccggtttaatgaagagccacagtgggggaagaggatagcagtttggctgctcaaaatcacatgaggtgttcataaaaaataaataaataaataaaataaatctgtattaaatccaaatccctgcagatg

SEQ ID NO: 3152 - DNA, 20 bp, Homo sapiens
taatgtcaagagcccggttt

SEQ ID NO: 3153 - DNA, 20 bp, Homo sapiens
catctgcagggatttggatt

SEQ ID NO: 3154 - DNA, 142 bp, Homo sapiens; identical to SEQ ID NO: 3151

SEQ ID NO: 3155 - DNA, 2001 bp, Homo sapiens
aaattagccgggcgtggcagtgcacacccatggtatcggttactcaggaggctgaggtgggaggattgcttgagcctaagagggagaggctgcagtgggctgagatcgtgccactgcactctagcctgggcaacagagtgagaccctgtctcaaaaaaaaaaaaaagaaaagaaaaagaaagaaagaaaagaaaagaagacacaaagtatggataattctgaaagttatattttataaagaataatctatccatgattaagctactgcagaactgcagatgagaaaaggtgatggactgtcctaggtagtggcaagggaaacaggagtgaaagaatttcaggaacatttcagagatggagctcagagtacttgatgatttattagagactcttggaatacagtattagtaggatttactgtgtcagtttagctatttatccattaacagtaacaatagtaggaaacacatactgtttaccataggtcaagcaatgttgtaaacattttacatggattaactcatttcattctcacaacactatgaagtatatttataaccatccccattttagagatgataaactaaggcttacatcagttaagttagccaataagtatcaagaatcagtaagaggttagatacaagatttagacccagatactgtaattccaaagctaaagagctcttaattgatcaactaaatagttgtaaaggaaagtaaacaaagtcgaaagcaggcagaatgtagtaatgtcaagagcccggtttaatgaagagccacagtgggggaagaggatagcagtttggctgctcaaaatcacatgaggtgttcataaaaaataaataaataaataaaataaatctgtattaaatccaaatccctgcagatgggagataagatttaactttttattttcttttttttttttttttttaaagccctgggtaattttgtggcggaaccaagtttgggaacctgtgtaataaaagatttctaagggctcttcctgctttaacattctagttgacattgtaaatgaagttcccagaaatcaaaggagcgagggagggatcctagctgcaggaaaacggctatgcattcagagtccacaccgtttatgctcccattttactaaacggtccctcatagggggagggatagaacaggcaacggaaagaaggatgtggtatccacgataagcaggctaaaaaagcaggcttttaaaaaggcttttctagcacgatttgcacaaagaaccccttcttgactatatatatttgtgttcatccaactggattttgaggtggattcctcagacccgtatctggctaatgatggatttcaatatattttctctaagcaccccgaagcgttgcacgaaacctctaggttgtggcctgcccgccccgaggccaggtgaatccggctcagcagcagaggtgtctgcaattacaccctctaatcccctactgtcagatatgaccctttccgcacatacctgagggccctctggtaagattgatctcttcctcagtgaccaaataatccactcttccgttcatgttttacagctcgtctggcttcctacttgggtcagctggagtgcagcacaggtgaaggtgaatcaatctcggcgctgcgcccacagcacagcggtttcggtttcagcagcctcgagacccggaaaaggaagcccgaaggactcggagcactgggaatgctgggaatcgtggttcctaccgccaatggattgcagtttctcaccggttcccaaagccaagcatgaggtgagcaaggggcaagttaccattctaatttgccattggaagcaagtgggaagggggtggctagtaaaagtaagggacctaaataaattgatattgtcgagaaaaaaaattttaaaaaaatctcctgccatcctagaaaatctccacaaatgtagaaaagaaaaaaaaggtgtattattctgtaagcatcgaaccagaccggaatgggtgt

SEQ ID NO: 3156 - DNA, 450 bp, Homo sapiens
gtgttcatccaactggattttgaggtggattcctcagacccgtatctggctaatgatggatttcaatatattttctctaagcaccccgaagcgttgcacgaaacctctaggttgtggcctgcccgccccgaggccaggtgaatccggctcagcagcagaggtgtctgcaartacaccctctaatcccctactgtcagatatgaccctttccgcacatacctgagggccctctggtaagattgatctcttcctcagtgaccaaataatccactcttccgttcatgttttacagctcgtctggcttcctacttgggtcagctggagtgcagcacaggtgaaggtgaatcaatctcggcgctgcgcccacagcacagcggtttcggtttcagcagcctcgagacccggaaaaggaagcccgaaggactcggagcactgggaatgctgggaatc

SEQ ID NO: 3157 - DNA, 20 bp, Homo sapiens
ctggaacataggggcactgt

SEQ ID NO: 3158 - DNA, 20 bp, Homo sapiens
cctaagccatgcgttaacct

SEQ ID NO: 3159 - DNA, 282 bp, Homo sapiens
ctggaacataggggcactgtctaccttgatacttaaatttcaaggagttggctcccgggacctgacgaaaacaattcctgggttttatctgacaagaggcttatttagcttttaaaaagatacacacacacacacacactacacacggattataattacaatttgctcaagaaaatgttttaagaaaggggggtgggggaatgtctcattcttttggcaactgggaaaattcaatctttttaatgttttaactcttacaataaggttaacgcatggcttagg

SEQ ID NO: 3160 - DNA, 25 bp, Homo sapiens
cctggaaatgtcatagacttcttgt

SEQ ID NO: 3161 - DNA, 20 bp, Homo sapiens
ttggtcatcaaagaggctga

SEQ ID NO: 3162 - DNA, 379 bp, Homo sapiens
cctggaaatgtcatagacttcttgtaatctcagggatagaaatgtgccaaccataaaaatcaaggttattattattaactgaaagtgggagaatggatattgggaggccactggcagtctctgacacaagaagtgacactttctgtctgaactaacctttctgcttatgaccttgagttatgtaaaaaatgtagaatgtagtggaaacttcaatctaccatttacaaaattagtggaaaccttgcctcaccttaatcacaccttgctctatttttgcacatttcctgtcatatattcactttgtctttttaatctctcttgtctgcttcagtcccctcctacttcagtattttattctatcagcctctttgatgaccaa

SEQ ID NO: 3163 - DNA, 26 bp, Homo sapiens
gggacagaactaatggaatacataca

SEQ ID NO: 3164 - DNA, 20 bp, Homo sapiens
ggtttcctgattcccacaac

SEQ ID NO: 3165 - DNA, 94 bp, Homo sapiens
gggacagaactaatggaatacatacatacatacagatagatagatagatagataggagtttattaagtattaatgttgtgggaatcaggaaacc

SEQ ID NO: 3166 - DNA, 20 bp, Homo sapiens
gggtagtggctgtggttcat

SEQ ID NO: 3167 - DNA, 20 bp, Homo sapiens
caggattgacaggtgagcag

SEQ ID NO: 3168 - DNA, 143 bp, Homo sapiens
gggtagtggctgtggttcatttttgccctgcgtggctgttggcctgtgtgtgtgtgtttggcacgcacatgcagcagacacagccatgtgccccagccaaaagggaagaggggcggggagcaactgctcacctgtcaatcctg

SEQ ID NO: 3169 - DNA, 23 bp, Homo sapiens
ggaaccagaagttcttagtgctg

SEQ ID NO: 3170 - DNA, 20 bp, Homo sapiens
aaccttcccaaaggagcttg

SEQ ID NO: 3171 - DNA, 307 bp, Homo sapiens
ggaaccagaagttcttagtgctgattccacaaagaaataaatgttgtccgggtgcctgtaatcctagcaatttgggaggccagatcacttgagcccaggagtttgagaccagcctgaccaacatggacaaaccctatctctataaaagatacaaacaaacaaacaaacaaaaaacagctgcactccagcccgggtgacagagtgagaccctgtcaaaaaaaaaaaagaaaaagaaaaagaagaagaagaaataaatttactccttcttacagctagagagatcaagccaagctcctttgggaaggtt

SEQ ID NO: 3172 - DNA, 23 bp, Homo sapiens
tccactggataatgtgaagtctc

SEQ ID NO: 3173 - DNA, 21 bp, Homo sapiens
catccatgctcaagtcactca

SEQ ID NO: 3174 - DNA, 392 bp, Homo sapiens
tccactggataatgtgaagtctcttaatttttgttttgttttcattttttttgtttgtttgtttgttttgagatggagtctcactctgtcgcccaggctggagtgcagtggcgcgatctcagctgactgcaagctctgcctcctgggttcacaccattctcctccctcagcctcctgagtagctgggactgcaggtgcccgccaccacgcctggctgatttttttgtatttttagtagaaacggggtttcaccatgttagccaggatggtctcgatctcctgacctcgtgatccgccctcctcggcctcccaaagtgctggtattacaggcgtgagccaccgcgcccggcgtgttttcatttttaaagatatgagtgacttgagcatggatg

SEQ ID NO: 3175 - DNA, 20 bp, Homo sapiens
ggtgggagagatgatctgga

SEQ ID NO: 3176 - DNA, 20 bp, Homo sapiens
ccttagcaaccttgcacaca

SEQ ID NO: 3177 - DNA, 252 bp, Homo sapiens
ggtgggagagatgatctggaaccatgaggggctaatgagactagagaggtagtaaggtagagaagaggtggatataggcagattcagatggtgaaaggcccagaaaccattttatctttgaatttggcgtgtgtgtgtgtgtgtgtgtgtatcatattccagagaaagaaatccactttatattatgacattgtggctttacacacacttacaccccacatatttggcactgtgtgtgcaaggttgctaagg

SEQ ID NO: 3178 - DNA, 2001 bp, Homo sapiens
cggaagtgagtatagaaatggcaggatgagagcaagatattcttcagagcctattattatttctgtagaattgaaagttccttgttgctaagtagctaaatctagaatttagtcacctgagagacaaaagggagagggcttatgtttccctttgttctgtggcctcagctacaaaccattgataaagcatggtataaaccatctagacagaaatggccatggaaactactgtttcttctgatggtaagtcattcataaagtttggttctatgcataatttggtatccagagtagtccactggataatgtgaagtctcttaatttttgttttgttttcattttttttgtttgtttgtttgttttgagatggagtctcactctgtcgcccaggctggagtgcagtggcgcgatctcagctgactgcaagctctgcctcctgggttcacaccattctcctccctcagcctcctgagtagctgggactgcaggtgcccgccaccacgcctggctgatttttttgtatttttagtagaaacggggtttcaccatgttagccaggatggtctcgatctcctgacctcgtgatccgccctcctcggcctcccaaagtgctggtattacaggcgtgagccaccgcgcccggcgtgttttcatttttaaagatatgagtgacttgagcatggatgtaggtagggtgaccaaccattccagtttggttgagactgaggggattgctgggtgcagcactttcagttttaaaaccaggacagtcctgggaaaatcaggatgaggtagtcacctcaattgccagtaaggaatagataaagtagtagaagatgaagatgcagttgagaatagggaaaattaatagaaacagtcctcaagtaggtgggagagatgatctggaaccatgaggggctaatgagactagagaggtagtaaggtagagaagaggtggatataggcagattcagatggtgaaaggcccagaaaccattttatctttgaatttggcgtgtgtgtgtgtgtgtgtgtgtatcatattccagagaaagaaatccactttatattatgacattgtggctttacacacacttacaccccacatatttggcactgtgtgtgcaaggttgctaaggatcttctagggatgccttctgatatttctgttctatttcctcaaggaaaaagactgcaggctatagccagctgaattacttccatgactctaatgggacagatattagtgacagacagataggaaaacagtgcattagggcattggaataagagggaagatgggtagagagcggtcttgatgaatttgaaatagctgtggggaaaggaagagtttatcaaacatgcagaagagggctgttggctcacctgatagtccgctgacattagaggacatggatttacggtggtaccacttcacagtatccatggtagaatgatggtacttcaggagctttggtctctgtaagtcctaggaatgaagacaatgagtctggttttaaagatttttttaaagttattctcctgttattgcctgctctcatgctgagctccaagaaaaagaataatatgacacaggttggtgtagcttatcagtcctttccacaacattatatctttgattagttcttcccattttcaatcctcccatccacaacaactgtcactccatagtaagtagaaaacatatcaagagagatatagagagcaaatctggcagttagaatttcatcccaattcagagatctttgttcttggaagttttgcctatgaactttgcttttctcttccatgctacttgcaccttgtggaataaggtgcctaacttgcagcagtgaaaactgcccagatgaatccagcctctttaagcaagttaatggcaaggataatgttcagcttgaaacaagttttccccatcttccagcatccacatagccagtctaggacaagaaaaggaaaaaaaccttaaatactttatattag

SEQ ID NO: 3179 - DNA, 20 bp, Homo sapiens
gaggaagcctttaggcaagc

SEQ ID NO: 3180 - DNA, 20 bp, Homo sapiens
tcccttgtgctttctggagt

SEQ ID NO: 3181 - DNA, 155 bp, Homo sapiens
gaggaagcctttaggcaagcagtaaattctattaaagctcaggttcaatacggtaagtagatgtagggagctttctgtgaagaggtacaggatggagttggttctctctctctctccttttgtctttaaaggaagactccagaaagcacaaggga

SEQ ID NO: 3182 - DNA, 22 bp, Homo sapiens
tggatactctcctcagcaaaaa

SEQ ID NO: 3183 - DNA, 27 bp, Homo sapiens
ttttagaaaagaaaattcatgaaacac

SEQ ID NO: 3184 - DNA, 542 bp, Homo sapiens
tggatactctcctcagcaaaaaaagtcatgaaatacataaaatattgaatacaatattactgacctcctaaagcttattcttgctcctgccacagtttctgcactaaattgataatttatttaatgctctgtattttgattttctttctctaatatctagcacaatgtcctgcactttgtatgctccaaacacataaagacttgtttaataaatagaaaaagaaatggataagtgttgccagccagactgtatgacaggtgcagaaattccccactttcaaaaactgttggtaaatatatttgagcaaacactcagactcttccctggcgatcctaaaatactagactctacaatggtttttgccctaataagaaaagagttccttttcggaagacctttaaactgcatagattctcattttctcttctgaaagcatttcgttttgtctttgggactctcctgtagctaactggagagaacaacattattctctccatacccttaaatgatgtcagtgtttcatgaattttcttttctaaaa

SEQ ID NO: 3185 - DNA, 23 bp, Homo sapiens
tgtctttgggactctcctgtagc

SEQ ID NO: 3186 - DNA, 24 bp, Homo sapiens
tcagtctttacaggcagtatggaa

SEQ ID NO: 3187 - DNA, 561 bp, Homo sapiens
tgtctttgggactctcctgtagctaactggagagaacaacattattctctccatacccttaaatgatgtcagtgtttcatgaattttcttttctaaaaattatactacaatatgaacacattttagtagcattcacttataatccaagacattttgcaatccctcctccgtttttccatttttcattgtacatagagctatatgaggcattacagaggatactaaaatgaacgaaaatcataaaccctgcagtcaagaatctttcagtctaatgaagttatgagtaaagatgaatacaatgaggaatagtaaataactttgagataaagaaactaaagtatatcataagactgatgcaacttgacacagaattgtgattatttttgatgtctccagttttgatagtcaaaggagacactatcaatagatattgcaagggcaacaggcataaactaatattatcttggacaatttgatatatagagtcaccctactcttaagtttctttacttttgcttttactttttattatggacattccatactgcctgtaaagactga

SEQ ID NO: 3188 - DNA, 1061 bp, Homo sapiens
tgtgattatttttgatgtctccagttttgatagtcaaaggagacactatcaatagatattgcaagggcaacaggcataaactaatattatcttggacaatttgatatatagagtcaccctactcttaagtttctttacttttgcttttactttttattatggacattccatactgcctgtaaagactgagataactatttaagtacccatcttccaacttcaactattatcaccacgtggccaatgttgtctcctctataccccctaaatccccaccctcatttactaaaagcaaatccaaagcattttcttgattcatcaaccagtttttcactacttcattctttttctctcctgattccttacttatcacctttccaacccatctttttatttttacttccagcactgcagttctgatctaactctgccaggacacagatccacagggtcagccctgcatcctgagcagcttagagggagaagccagaccagcagtgcctcacaccttgtcctcttctgctctggacagatggctccataacgacagcttcataatggcagtggatgggaccctcgtgtacatcagagtcactcttctgctgctctggcttggggtatttttgtctatttccggctactgtcaggctgggccctcccagcatttcacttcccyggaagtggtgatccccttgaaggtgatcagcaggggcagaagtgcaaaggctcctggatggctctcctatagtctgcggtttgggggccagaaacacgttgttcatatgagggtcaagaagctcttagtttctagacacctcccagtgttcacctacacagatgaccgtgcactcctggaggatcagctcttcatcccagatgactgttactatcatggttacgtggaggcagcccctgagtctctggttgtgttcagtgcttgttttgggggctttcgaggagtattaaaaataagtggcctcacttatgaaattgaacccatcaggcactctgccacatttgaacacctggtttataagataaacagtaatgagacacaattc

SEQ ID NO: 3189 - DNA, 22 bp, Homo sapiens
tagatattgcaagggcaacagg

SEQ ID NO: 3190 - DNA, 22 bp, Homo sapiens
gacaaaaataccccaagccaga

SEQ ID NO: 3191 - DNA, 576 bp, Homo sapiens
tagatattgcaagggcaacaggcataaactaatattatcttggacaatttgatatatagagtcaccctactcttaagtttctttacttttgcttttactttttattatggacattccatactgcctgtaaagactgagataactatttaagtacccatcttccaacttcaactattatcaccacgtggccaatgttgtctcctctataccccctaaatccccaccctcatttactaaaagcaaatccaaagcattttcttgattcatcaaccagtttttcactacttcattctttttctctcctgattccttacttatcacctttccaacccatctttttatttttacttccagcactgcagttctgatctaactctgccaggacacagatccacagggtcagccctgcatcctgagcagcttagagggagaagccagaccagcagtgcctcacaccttgtcctcttctgctctggacagatggctccataacgacagcttcataatggcagtggatgggaccctcgtgtacatcagagtcactcttctgctgctctggcttggggtatttttgtc

SEQ ID NO: 3192 - DNA, 951 bp, Homo sapiens
tttacttccagcactgcagttctgatctaactctgccaggacacagatccacagggtcagccctgcatcctgagcagcttagagggagaagccagaccagcagtgcctcacaccttgtcctcttctgctctggacagatggctccataacgacagcttcataatggcagtggatgggaccctcgtgtacatcagagtcactcttctgctgctctggcttggggtatttttgtctatttccggctactgtcaggctgggccctcccagcatttcacttccccggaagtggtgatccccttgaaggtgatcagcaggggcagaagtgcaaaggctcctggatggctctcctatagtctgcggtttgggggccagaaacacgttgttcatatgagggtcaagaagctcttagtttctagacacctcccagtgttcacctacacagatgaccgtgcactcctggaggatcagctcttcatcccagatgactgttactatcatggttacgtggaggsagcccctgagtctctggttgtgttcagtgcttgttttgggggctttcgaggagtattaaaaataagtggcctcacttatgaaattgaacccatcaggcactctgccacatttgaacacctggtttataagataaacagtaatgagacacaattcccagctatgagatgtggcttaacagagaaggaagtagcacgccaacagttggaatttgaagaggctgagaactcagctctggaaccaaaatctgctggtgactggtggactcatgcatggtttctggagctagttgttgtggtgaaccatgatttcttcatttactctcaaagcaacatctcaaaggtgcaagaggatgtatttcttgttgtcaacatagtggattccatgtataagcagttaggtacttacataattttgattggaattgaaatttggaatcaa

SEQ ID NO: 3193 - DNA, 723 bp, Homo sapiens
gatgggaccctcgtgtacatcagagtcactcttctgctgctctggcttggggtatttttgtctatttccggctactgtcaggctgggccctcccagcatttcacttccccggaagtggtgatccccttgaaggtgatcagcaggggcagaagtgcaaaggctcctggatggctctcctatagtctgcggtttgggggccagaaacacgttgttcatatgagggtcaagaagctcttagtttctagacacctcccagtgttcacctacacagatgaccgtgcactcctggaggatcagctcttcatcccagatgactgttactatcatggttacgtggaggcagcccctgagtctctggttgtgttcagtgcttgttktgggggctttcgaggagtattaaaaataagtggcctcacttatgaaattgaacccatcaggcactctgccacatttgaacacctggtttataagataaacagtaatgagacacaattcccagctatgagatgtggcttaacagagaaggaagtagcacgccaacagttggaatttgaagaggctgagaactcagctctggaaccaaaatctgctggtgactggtggactcatgcatggtttctggagctagttgttgtggtgaaccatgatttcttcatttactctcaaagcaacatctcaaaggtgcaagaggatgtatttcttgttgtcaacatagtggattcc

SEQ ID NO: 3194 - DNA, 22 bp, Homo sapiens
tctggcttggggtatttttgtc

SEQ ID NO: 3195 - DNA, 22 bp, Homo sapiens
cagattttggttccagagctga

SEQ ID NO: 3196 - DNA, 549 bp, Homo sapiens
tctggcttggggtatttttgtctatttccggctactgtcaggctgggccctcccagcatttcacttccccggaagtggtgatccccttgaaggtgatcagcaggggcagaagtgcaaaggctcctggatggctctcctatagtctgcggtttgggggccagaaacacgttgttcatatgagggtcaagaagctcttagtttctagacacctcccagtgttcacctacacagatgaccgtgcactcctggaggatcagctcttcatcccagatgactgttactatcatggttacgtggaggcagcccctgagtctctggttgtgttcagtgcttgttttgggggctttcgaggagtattaaaaataagtggcctcacttatgaaattgaacccatcaggcactctgccacatttgaacacctggtttataagataaacagtaatgagacacaattcccagctatgagatgtggcttaacagagaaggaagtagcacgccaacagttggaatttgaagaggctgagaactcagctctggaaccaaaatctg

SEQ ID NO: 3197 - DNA, 666 bp, Homo sapiens
ttgtctatttccggctactgtcaggctgggccctcccagcatttcacttccccggaagtggtgatccccttgaaggtgatcagcaggggcagaagtgcaaaggctcctggatggctctcctatagtctgcggtttgggggccagaaacacgttgttcatatgagggtcaagaagctcttagtttctagacacctcccagtgttcacctacacagatgaccgtgcactcctggaggatcagctcttcatcccagatgactgttactatcatggttacgtggaggcagcccctgagtctctggttgtgttcagtgcttgttttgggggctttygaggagtattaaaaataagtggcctcacttatgaaattgaacccatcaggcactctgccacatttgaacacctggtttataagataaacagtaatgagacacaattcccagctatgagatgtggcttaacagagaaggaagtagcacgccaacagttggaatttgaagaggctgagaactcagctctggaaccaaaatctgctggtgactggtggactcatgcatggtttctggagctagttgttgtggtgaaccatgatttcttcatttactctcaaagcaacatctcaaaggtgcaagaggatgtatttcttgttgtcaacatagtggattcc

SEQ ID NO: 3198 - DNA, 894 bp, Homo sapiens
tttacttccagcactgcagttctgatctaactctgccaggacacagatccacagggtcagccctgcatcctgagcagcttagagggagaagccagaccagcagtgcctcacaccttgtcctcttctgctctggacagatggctccataacgacagcttcataatggcagtggatgggaccctcgtgtacatcagagtcactcttctgctgctctggcttggggtatttttgtctatttccggctactgtcaggctgggccctcccagcatttcacttccccggaagtggtgatccccttgaaggtgatcagcaggggcagaagtgcaaaggctcctggatggctctcctatagtctgcggtttgggggccagaaacacgttgttcatatgagggtcaagaagctcttagtttctagacacctcccagtgttcacctacacagatgaccgtgcactcctggaggatcagctcttcatcccagatgactgttactatcatggttacgtggaggcagcccctgagtctctggttgtgttcagtttgcttgttgggggctttcgaggagtattaaaaataagtggcctcacttatgaaattgaacccatcaggcactctgccacatttgaacacctggtttataagataaacagtaatgagacacaattcccagctatgagatgtggcttaacagagaaggaagtagcacgccaacagttggaatttgaagaggctgagaactcagctctggaaccaaaatctgctggtgactggtggactcatgcatggtttctggagctagttgttgtggtgaaccatgatttcttcatttactctcaaagcaacatctcaaaggtgcaagaggatgtatttcttgttgtcaacatagtggattcc

SEQ ID NO: 3199 - DNA, 726 bp, Homo sapiens
gaagtggtgatccccttgaaggtgatcagcaggggcagaagtgcaaaggctcctggatggctctcctatagtctgcggtttgggggccagaaacacgttgttcatatgagggtcaagaagctcttagtttctagacacctcccagtgttcacctacacagatgaccgtgcactcctggaggatcagctcttcatcccagatgactgttactatcatggttacgtggaggcagcccctgagtctctggttgtgttcagtgcttgttttgggggctttcgaggagtattaaaaataagtggcctcacttatgaaattgaacccatcaggcactctgccacatttgaacacctggtttataagataaacagtaatgagacacaattcccagctatgagatgtggcttaacagagaaggaagtagcacgccaacagttggaatttgaagaggctgagaactcagctctggaaccaaaatctgctggtgactggtggactcatgcatggtttctggagctagttgttgtggtgaaccatgatttcttcatttactctcaaagcaacatctcaaaggtgcaagaggatgtatttcttgttgtcaacatagtggattccatgtataagcagttaggtacttacataattttgattggaattgaaatttggaatcaaggaaatgttttcccaatgacaagcatagaacaggtcctgaacgatttctctcaatgg

SEQ ID NO: 3200 - DNA, 22 bp, Homo sapiens
cccagctatgagatgtggctta

SEQ ID NO: 3201 - DNA, 22 bp, Homo sapiens
tgcaattggtgaatttctctgc

SEQ ID NO: 3202 - DNA, 631 bp, Homo sapiens
cccagctatgagatgtggcttaacagagaaggaagtagcacgccaacagttggaatttgaagaggctgagaactcagctctggaaccaaaatctgctggtgactggtggactcatgcatggtttctggagctagttgttgtggtgaaccatgatttcttcatttactctcaaagcaacatctcaaaggtgcaagaggatgtatttcttgttgtcaacatagtggattccatgtataagcagttaggtacttacataattttgattggaattgaaatttggaatcaaggaaatgttttcccaatgacaagcatagaacaggtcctgaacgatttctctcaatggaaacaaatcagtctttcccagctacagcatgatgctgcacatatgttcataaaaaattcacttataagtatacttggcctagcctatgttgcaggaatatgtcgtccacctattgattgtggagttgataattttcaaggagatacctggtctctttttgccaacactgtggcccatgagttaggtcatacgttaggtatgcagcatgatgaagaattctgtttttgtggggaaagagttgcatcatgaatacttttagagtgccagcagagaaattcaccaattgca

SEQ ID NO: 3203 - DNA, 22 bp, Homo sapiens
actgtggcccatgagttaggtc

SEQ ID NO: 3204 - DNA, 23 bp, Homo sapiens
tctcccacaaaagacatcagaga

SEQ ID NO: 3205 - DNA, 674 bp, Homo sapiens; identical to SEQ ID NO: 3041

SEQ ID NO: 3206 - DNA, 20 bp, Homo sapiens
ccaaaaatctccctgcaatg

SEQ ID NO: 3207 - DNA, 20 bp, Homo sapiens
ctgcaagttcatgccatcag

SEQ ID NO: 3208 - DNA, 844 bp, Homo sapiens
catagcctctgtgctggcagtagggtggggaccacccatagccacagtggcagtgatgtttgttattgcagatccccttcatattgcaggtctcaggaaggcagacatgtgacaagacagacagactgacacacttcttatggatgcagatctttcctgggccacacacagtaccatctttcacttcaccaatgtcagatatgttcatccttaaatgatagtcaataccccagcaggtgacaccattgatatgagtgtgctgcaaagtaaaatgatcttggagaagaggaatgtctctcacattctcacattgaactctcccacaaaagacatcagagatatgacattttaggtatgttgtgccatttataccacagtgaccaaaacggtttccctgagaattgatttctttatagcaattctgagatgcactttttgcatctttaccaaaaatctccctgcaatgctggtcatggttattacacctcttttgatagcagtaggmactgtcactacaggggatcccgtcctgcacatatctatcttctggacactgatgagatgttccattgcaccattctggaaggtcacattcattgacctcttgtctacagagttcccctgatggcatgaacttgcagtctttgcaacaaagcccaaaagcacaggcagccccaggccttagagtgcagttcaacagacaacaggcgtcttgttcacactgctgtacggatccacagtcacactgctcttctctttcaaccacaccattcccacagcgctttagcataaagatttcccccaatcttggaggattatgcagacatgatccctggtttaaggt

SEQ ID NO: 3209 - DNA, 24 bp, Homo sapiens
acatgtgacaagacagacagactg

SEQ ID NO: 3210 - DNA, 24 bp, Homo sapiens
atgtgagagacattcctcttctcc

SEQ ID NO: 3211 - DNA, 724 bp, Homo sapiens
tttcttaacctgatgaatgagccttagtttctttgggaccagaacattgtcgtagatacataagaagcccgacagtaaacaggaaagtcaaaacagacaaagaaggaatcacaatcagcggcaaaaaaactcctctctttgcagatgctgggccactgtcaatactgcccccatagcctctgtgctggcagtagggtggggaccacccatagccacagtggcagtgatgtttgttattgcagatccccttcatattgcaggtctcaggaaggcagacatgtgacaagacagacagactgacacacttcttatggatgcagatctttcctgggccacacacagtaccatctttcacttcaccaatgtcagatatgtkcatccttaaatgatagtcaataccccagcaggtgacaccattgatatgagtgtgctgcaaagtaaaatgatcttggagaagaggaatgtctctcacattctcacattgaactctcccacaaaagacatcagagatatgacattttaggtatgttgtgccatttataccacagtgaccaaaacggtttccctgagaattgatttctttatagcaattctgagatgcactttttgcatctttaccaaaaatctccctgcaatgctggtcatggttattacacctcttttgatagcagtaggcactgtcactacaggggatcccgtcctgcacatatctatcttctggaca

SEQ ID NO: 3212 - DNA, 19 bp, Homo sapiens
gcccaggaaagatctgcat

SEQ ID NO: 3213 - DNA, 20 bp, Homo sapiens
gcccgacagtaaacaggaaa

SEQ ID NO: 3214 - DNA, 267 bp, Homo sapiens
gcccaggaaagatctgcatccataagaagtgtgtcagtctgtctgtcttgtcacatgtctgccttcctgagacctgcaatatgaaggggatctgcaataacaaacatcactgccactgtggctatgggtggtccccaccctactgccagcacagaggctatgggggcagtattgacagtggcccagcatctgcaaagagaggagtttttttgccgctgattgtgattccttctttgtctgttttgactttcctgtttactgtcgggc

SEQ ID NO: 3215 - DNA, 598 bp, Homo sapiens
atggggaaaggggagtggatggagagtcccactagaggactaagtggctgtggaaaccaacatgccagaatgtgctggcttatgcatctgacaacttgcagggacatttctgcatgctgtgaggaccagtgattattcccagccagtcatttttcttaatgacttggactcatcaaactcatggccattttgaagccaataaagtaagtgggagatttgaggttcaaaaagaccttaataatggggactcagatacctaacactttgccaccaggtactcctccttcaatgccagccwaattataaacttgggctccttcgtttataaagtagtgatacacaagcgtactaaatgagattttatagaaaatccacttatatgtcacaattctaagttcctttccatgctgagatccattttcccaggctttggaacttatgagagggaaagggcaattctcaatgtttccatagtaatagaacaggagtcagtattactatgcaagcactgagaagactccaatcagaagtgaacagtttagcctctgttgtacttcagaatcaccatgtcctggatacaatgacagcccaagaagga

SEQ ID NO: 3216 - DNA, 614 bp, Homo sapiens
atggggactcagatacctaacactttgccaccaggtactcctccttcaatgccagccwaattataaacttgggctccttcgtttataaagtagtgatacacaagcgtactaaatgagattttatagaaaatccacttatatgtcacaattctaagttcctttccatgctgagatccattttcccaggctttggaacttatgagagggaaagggcaattctcaatgtttccatagtaatagaacaggagtcagtattactatgcaagcactgagaagactccaatcagaagtgaacagtttagcctctgttgtacttcagaatcaccatgtcctggatacaatgacagcccaagaaggaggagcttatgcaatcattggtgaggaaccctgcttatgtgtaaatcactagggacagacagaatctaatctgaactttttgaaagacaaaataaacactcttcatcttataaatgaggctaaaccattcaattggactgacccattgccagtgataggagattggttgaatgcagtatgggtaaatgtgtttagatttgttcttttctgcttattaattctccttctaatctgtgttcttctctccctttgcagac

SEQ ID NO: 3217 - DNA, 20 bp, Homo sapiens
tccaaagaagggacaaggaa

SEQ ID NO: 3218 - DNA, 20 bp, Homo sapiens
gagcagggcttatctctcca

SEQ ID NO: 3219 - DNA, 279 bp, Homo sapiens
tccaaagaagggacaaggaaatacgaatagtctccatctacgagttttggttaaggtgaacactgatggtaaaattgaaaggacaaggacagctacccaaaacattcccatcttgtaaaaaccttgacactgcttcacttgtgacatcacctggtcttcaggtactccctcatgtagttcaattgaataatgcctttaacctctgtctgagtcacttaaaaaaaactggtctcaagtgatatatatatatatccttgggtggagagataagccctgctc

SEQ ID NO: 3220 - DNA, 20 bp, Homo sapiens
tggagagataagccctgctc

SEQ ID NO: 3221 - DNA, 20 bp, Homo sapiens
aaagtcaaagcatgcaacca

SEQ ID NO: 3222 - DNA, 223 bp, Homo sapiens
tggagagataagccctgctcttggtctctgattcttttctttttttccctcatttaaatttttattcttgatttccaacttttattttaaggtcagtgttacatgtgcaggataggacatgcaggttcattacataggtaaacactgtcacggtggtttgccacacagatcatcccatcacctgactttctttcagagcatggtggttgcatgctttgacttt

SEQ ID NO: 3223 - DNA, 21 bp, Homo sapiens
tctgattctcacctcccttct

SEQ ID NO: 3224 - DNA, 20 bp, Homo sapiens
ctgggcaagatagcaagacc

SEQ ID NO: 3225 - DNA, 381 bp, Homo sapiens
tctgattctcacctcccttctatcctgatccctatcttcttaaagtcccccttgcttcttttcttccacatctccagctccctcttattatttgacctggaacatcacctcttgttggatatgataagccttaaaaacaagggagaagtttttaaaacacacccagacacacacacacacacacacacacacacagtgtgtcactctttcactcagctggagtgcagtggtaggatcatgactcactgtaacctccagctcctggtctcaagtgatcctcctgcctcagcctcccaagaagctggatctatagagatacactatcacacctggctgatttttaaattttttttagagacagggtcttgctatcttgcccag

SEQ ID NO: 3226 - DNA, 20 bp, Homo sapiens
tttgacctggaacatcacct

SEQ ID NO: 3227 - DNA, 23 bp, Homo sapiens
aaatcagccaggtgtgatagtgt

SEQ ID NO: 3228 - DNA, 250 bp, Homo sapiens
tttgacctggaacatcacctcttgttggatatgataagccttaaaaacaagggagaagtttttaaaacacacccagacacacacacacacacacacacacacacagtgtgtcactctttcactcagctggagtgcagtggtaggatcatgactcactgtaacctccagctcctggtctcaagtgatcctcctgcctcagcctcccaagaagctggatctatagagatacactatcacacctggctgattt

SEQ ID NO: 3229 - DNA, 20 bp, Homo sapiens
tttgacctggaacatcacct

SEQ ID NO: 3230 - DNA, 23 bp, Homo sapiens
aaatcagccaggtgtgatagtgt

SEQ ID NO: 3231 - DNA, 250 bp, Homo sapiens; identical to SEQ ID NO: 3228

SEQ ID NO: 3232 - DNA, 23 bp, Homo sapiens
tggacaaatagcaaacatctcaa

SEQ ID NO: 3233 - DNA, 21 bp, Homo sapiens
ggcaaatcctgtttgcactaa

SEQ ID NO: 3234 - DNA, 416 bp, Homo sapiens
tggacaaatagcaaacatctcaaatgtaaccaattagaaaaagaccttaaggctgggtgcggtggctaacgcctgtaatcccagcactttgggaggcccaggcaggggaatcacttgaggccaggagtttgagaccaatctggccaacatggtgaaaccctctctctcctaaaaatacaaaaattagtcaggcgtggtggtgtgtgcctgtaatcccagctactcaggagattgaagcaggagaattgcttgaactcaggaggcagaggttgcagtgagccaagattgcaccactgcattccagcctggcagcctgggcgccagagtgagaccctgtctcaaaaaataagaaaaagaaaaagaccttaagagtgttaaagcaaagcaaatgtatattagtgcaaacaggatttgcc

SEQ ID NO: 3235 - DNA, 22 bp, Homo sapiens
cacaccaaacagttctacagca

SEQ ID NO: 3236 - DNA, 20 bp, Homo sapiens
atgcggaaccctaatgtgtc

SEQ ID NO: 3237 - DNA, 186 bp, Homo sapiens
cacaccaaacagttctacagcaacgtggcctggcctgctagcagaaaatagtactgcatccttttgattccatatgcacaaaacacatatatagacatttaaataaactggtttgaaaatggtatgtatgatgctgttaataatcactacattctctattatatgtgacacattagggttccgcat

SEQ ID NO: 3238 - DNA, 20 bp, Homo sapiens
gtcctgccttggataggtga

SEQ ID NO: 3239 - DNA, 20 bp, Homo sapiens
gcttacaatgcccacaacct

SEQ ID NO: 3240 - DNA, 144 bp, Homo sapiens
gtcctgccttggataggtgaaaaaggacaggaaaaggtcagagagagagagagggattctgattcttcaggtctgtttctgaggcctaaagcactccaacattaattataacaaaactataataaggttgtgggcattgtaagc

SEQ ID NO: 3241 - DNA, 20 bp, Homo sapiens
tcaatgacgtgaagggactg

SEQ ID NO: 3242 - DNA, 22 bp, Homo sapiens
gccagatgagacacacaaagag

SEQ ID NO: 3243 - DNA, 158 bp, Homo sapiens
tcaatgacgtgaagggactgtttgggggtacacagaagttctagaaatgagttaggtttgagtaatcgtgtgtatgtgtgtgtctgtgtgtgtgtattgtgtttagtcttttaaaaatcttcttgaatttagttctctctttgtgtgtctcatctggc

SEQ ID NO: 3244 - DNA, 23 bp, Homo sapiens
tcaactgtgtaagagctttggaa

SEQ ID NO: 3245 - DNA, 21 bp, Homo sapiens
tgctgttcctttagcttgcat

SEQ ID NO: 3246 - DNA, 146 bp, Homo sapiens
tcaactgtgtaagagctttggaaaaaaatgcaaaggtttacaacaaacaaacaaacatacatcaagaaaatgccatcttcaaaatactccaataattaaagaaacctttgccaaaacattagttaatgcaagctaaaggaacagca

SEQ ID NO: 3247 - DNA, 23 bp, Homo sapiens
gcagttgatagaagccatacaga

SEQ ID NO: 3248 - DNA, 20 bp, Homo sapiens
atgaagcaatgcactgacca

SEQ ID NO: 3249 - DNA, 426 bp, Homo sapiens
gcagttgatagaagccatacagattattaatattttgcttagatatttctatggccagatgtctatatatatatatatgtattatgtattacttttattttatttggttgttttttatatatgtgtttatatatgtgtgtgtgtgtgtgtatgtgtgtatgtatatatataacagaaatatctaagcaaaatattaataaaatatttttgtctatatattcatgtgtacatatataccatatatatgtagtctatctatctatcatctatctatcatttgattgtttgtttttgtagagacaaagtctcactatattgctcaggctggtcttgaactcctggctcaagcaattcttctgcctcagcctcctaaagtgctgggattataagcatgagccaccatgcctggtcagtgcattgcttcat

SEQ ID NO: 3250 - DNA, 2001 bp, Homo sapiens
aaaagggaaacctcatacactgttggtgggaatgtaaattagtacaatcactatggagaacagtttggaggttcctcacagaaatgaacatagagctaccatatgatccagcaatcccactcctgggtatatactccaaagaaagtaaacagtatatcaaagagatatctgcactcctatgtttgttccagcactgcttacaatagctaagatttggaagcaacctaagtgtccattaacagatgaatggataaagaaaatgtggtacatatacataatggagtactactcagccattaacaacaatgagctcctataattttcatttgcagcaacatggatggaactggaggtcatgttaagtgaaataagccaggcacaaacattgcatgttctcgcttatctgtggaatgtaaaaatcaaaacaattgaacttgtggacacagagcagcagtagaatcgttaccagaggctgggaaggggacgtggtggtggaggggaggttgggatagctaataggttttaaaaaatagaaagaatgaataagacctactatttgatatcacaacagggtgcctatagtcaataataaattaattctacattttaaaataacttaaaaagcgtaattggattgtttgtaacacaaaggaaaaatgctagagggaatggatattccattctccatgatgtgattatttaatatcgcatgactgtatcaaaacatctcatgtaccccacaaatgcatatacctactatgaacccacaaaaattaaaaaaaaaaaaactaaaaaaactagcagtgctcactttggaagcaaatactaaaattggaataatacacagaatattatcatggccccttgcacaaggatgacacacaaatttgtgaagtactctatatttttatattaaataaaattattatttaaaaatttttaaaaactaaagaattttaatacacagtttggaaaaacatgctatatagtttctaagtagcccatagtgaaaaataacataataaataatttttaatttccaaaaataaaagtaaaaatagaccaatgctgtaagaactgcttcttatagcatagtaaaaagaaaaaaaaaaaaaaaggagtggccaagatggccgaatagaagcagatagtgtgcatggctctcatggagaggaagagaaggggtgaataaatacaataccttcaattgaaacatccaggtactcgcactggggttaatcaaggaaacagccttacccacagagaacaaacaaaagcaagacaggacaatggcccacctagcagcgacatggagccatgggattcccccctgcccagggaagcagtgagtgaatgagcagccctgggaaaccatgcttctcccacagatctttgcaacttgctggtcaagaggtctccttgtgaacgcactccaccagggccttcagtcttcagtttgacagacagaactaggtggagtcttggcatagcagctgctcaggcacgcatggagaccctgcagccttagatgctaaggctttctagaaaacgtagctgcagctccagcaaagtgggaggttagactcctgtgcatgcccctaggaaagaggatgaatccagggggctgagcagcaacagcccacggaccccacttccacagcacttcacaagataagacccactgacttggaattccagcagctaccagtagtggcactgcacctccctaagaaggagctccctggggttggggtgggccaccaccattgctgttcaggcaccttagtcattccagccttcaggctttggagagtctgagctgacctggggcagaagggatcccccagaacagtacagccactctaccaaaatgtggccagactgctgctttaagcaggtacccaatcctgttcctccttactgagcaggacctcccaactcaggcctcaagccaccccacctaggcactccaaccaacagagatctgaattactcttggca

SEQ ID NO: 3251 - DNA, 20 bp, Homo sapiens
acgtgagaatggaagggaag

SEQ ID NO: 3252 - DNA, 20 bp, Homo sapiens
ggctggagctacaggaagaa

SEQ ID NO: 3253 - DNA, 149 bp, Homo sapiens
acgtgagaatggaagggaaggttttttgttgttttgttttgttttgttttggtcacttagccacctatacccatgtccaaagtgagtggtttccctattctgtcagtccctgtctccccagtctctgcattcttcctgtagctccagcc

SEQ ID NO: 3254 - DNA, 21 bp, Homo sapiens
ggattgctaagtgccttcgat

SEQ ID NO: 3255 - DNA, 20 bp, Homo sapiens
atagcctcatggtggagtgg

SEQ ID NO: 3256 - DNA, 375 bp, Homo sapiens
ggattgctaagtgccttcgatatactacagcaagatagtgaacagctgatggtgagcaacaggcaattaaaatccaggcatgaatgtcagtatcctctctgactgcatacaaagtgaccctcatttccttccaggggaggataaagaaatccaagtggctgaacctaaaaataaataaataaataaaagttaaatgcccaaccaagggagcgctgtaatcaggaccttggtggagaaaacctgagactctgacacacatgatgggaacatctgactagatcctttgaacactcacgctccatatactcatccacgggagtgattcacccctgtatagtgaaggagaatgcagatgccactccaccatgaggctat

SEQ ID NO: 3257 - DNA, 21 bp, Homo sapiens
ggattgctaagtgccttcgat

SEQ ID NO: 3258 - DNA, 20 bp, Homo sapiens
atagcctcatggtggagtgg

SEQ ID NO: 3259 - DNA, 375 bp, Homo sapiens; identical to SEQ ID NO: 3256

SEQ ID NO: 3260 - DNA, 21 bp, Homo sapiens
gcttctggagaactcaaccaa

SEQ ID NO: 3261 - DNA, 20 bp, Homo sapiens
tgagggaagaagggagcttt

SEQ ID NO: 3262 - DNA, 398 bp, Homo sapiens
gcttctggagaactcaaccaacaacaaagtagctacagaaggcacctaacactcctagggccaggagaacagaagaaagaagttgggtttactagagtggcgatgattaaagaacattccctgcagagcaaggacccagacctctaaagatggcacagtgaacagctgctgctgcttcaagaactcagaggaccacaaccctgctcactcccggacccctaaggaggtcagtgtccaactgctgctggtatttctaaggaaaaatgagggtggttctaaaagtgacaacagaactggaatctgaaaccaaatataattgccagagtgaatggccccaaccaaaataatggtgacactcatggtaagcacacaggaaagaaagctcccttcttccctca

SEQ ID NO: 3263 - DNA, 20 bp, Homo sapiens
cacagctgaatgtgccaaac

SEQ ID NO: 3264 - DNA, 20 bp, Homo sapiens
tttcaagctgttgtccctca

SEQ ID NO: 3265 - DNA, 133 bp, Homo sapiens
cacagctgaatgtgccaaacagaaatgagttgtgtacaggcacatcctgaacattacatagtacagcaaaaaaaaaaaaaaaaaaagagagagagagagaggagagttaaaaatgagggacaacagcttgaaa

SEQ ID NO: 3266 - DNA, 21 bp, Homo sapiens
tgaatgtgccaaacagaaatg

SEQ ID NO: 3267 - DNA, 20 bp, Homo sapiens
tcaggattgcaagcattagc

SEQ ID NO: 3268 - DNA, 270 bp, Homo sapiens
tgaatgtgccaaacagaaatgagttgtgtacaggcacatcctgaacattacatagtacagcaaaaaaaaaaaaaaaaaaagagagagagagagaggagagttaaaaatgagggacaacagcttgaaactatcttttctgtgcctttgctcaggaaacataaagacacaacttctgggaaaaggaacctttaatattgcttaagacactgtagagtaagtaagaataggctaggaatcctttgctgtgatagctaatgcttgcaatcctga

SEQ ID NO: 3269 - DNA, 2001 bp, Homo sapiens
catgttgcatacccaaattatgaccaagctcgtggcccaaagtaattgcaaaaacgaccaacctgttgtcttcaaaaacatcaactccagtattaaaaggattctggcatattcctttaacataggcaacaccaagcttcatgccttgtgtgtcttttatgaaaagatgtgcaacatcatgttgtagtcgattattaaggttataattcttccaaatagaaaagtcctctaaaacattatctaggtctccactggtaggaagtggatttgatgcagtccatatatcaattccagtcaaaattacatcaacctccaaaggatgatagaaggaatccactatattgacaacgttaaatacttcatgctgcactgttgttgcattactttgagagaaaagatatctaatattatccacgaccactaccagctcaacaaaccgctgatgggtccaccagcccacaaaagaactttgcttcagagtgaaattatatgacaattgcaactccatctggtgtgctattttctcttctgttaacccacatctcataggtggaaactgtgtatcatcactgtctatcttatatactaggtgttcaaatgtggcagaaacactaattggcttgatttcataaacaaggtcatttatctgtagcattccaagaaagcccccagaacaggtactaagggcaaccaaggactcagggaccccctccacataaccatggtagtagcagtcatcctggatgaagggctgatcctggagcagggcatgctgctctgtgtaggtgaacacaggaaggtgtgcagcaaacaacagcttatttaccctcatgtggacaatgtatctctgtcccccaaaccgcaggctataggagagccatccaggagcctttgcacctctgcccctgctgatcaccttcaaagggatcaccacttctggagaagtgaaatactgggagggcctggcctgagagtggccagaaatagacaaaaacatcccaaaccagagcagcagaagagtgaccctgatgtgcaccaggggctcacccactgccattatgaagctgtcattatggagccatctgtctagagcagaagagaacaaggtgtgaggcactgctggtctggctcctccctctgagctgttcagggtgcatggctgacctttagggatctggggatctgtgtcctggtggagctggaccatcagagctgcagtgctgaaaataaaaactgaaagagccaggatggggtgggtgggatagaaagggagaaagagagagagaaaaaaggcaaagtgattcctgcatttggaccatatttgaagcaataaaatgcattaggattctcttaatacatatggccaagaagatttccagataggggagattgcacataggtgagttattaccaaattttcatgatggatacctaaagattcattatatactgttcttaaaatatgtaaaatggcaagacattttccattttattttaatgtatgtatttcttttattatttccttattttacagatggggtactgctctgttgcccaggctgtagtgcagtgacacaatcacagcacattgcaccctcaaagtcctagactcacgagatcctcccaccttagcctccaagtagaactgcaggcatgcattgcaacagccagctaatttttctttttgattttttttggggggatagagatggagtctcactatgttacccaggctggtctcaaactcctggtctcaagtgatcttcttgtctcagccttccaaagtactgggattacaggcatgagctgtcataccgagcaaaattgttcattttaaagacactggattctgacacaaatctttcttccaaccaaaaacctactggcaacctgcacattcaataagtatatggacaacacatccaaaatccaccattctttgttcctttattcatgtagtttgctccatctcccctcttctatcccagacattttatgtat

SEQ ID NO: 3270 - DNA, 20 bp, Homo sapiens
ggactttgagggtgcaatgt

SEQ ID NO: 3271 - DNA, 24 bp, Homo sapiens
catgatggatacctaaagattcat

SEQ ID NO: 3272 - DNA, 135 bp, Homo sapiens
ggactttgagggtgcaatgtgctgtgattgtgtcactgcactacagcctgggcaacagagcagtaccccatctgtaaaataaggaaatartaaaagaaatacatacattaaaataaaatggaaaatgtcttgcca

SEQ ID NO: 3273 - DNA, 21 bp, Homo sapiens
ttgagaaacctcctccaatca

SEQ ID NO: 3274 - DNA, 20 bp, Homo sapiens
agctgcctcactccctgtta

SEQ ID NO: 3275 - DNA, 119 bp, Homo sapiens
ttgagaaacctcctccaatcaagactttttaattttataatatattcttatctgcagaaaagccctgggcattctaaggaaggaaggcatgtgatagggtaacagggagtgaggcagct

SEQ ID NO: 3276 - DNA, 20 bp, Homo sapiens
cagtggcctacatgacagga

SEQ ID NO: 3277 - DNA, 21 bp, Homo sapiens
gagcgtacagaacatccaagc

SEQ ID NO: 3278 - DNA, 301 bp, Homo sapiens
cagtggcctacatgacaggagaagtatttgccaaacatctatctgatacctgataagggttactatccaaaatatataagaaacccataaaactcaaaagcaataaattaagttttttcaaaatacaaagttgggcaaatgacctgaataggcatttatccaaaaatatatatatatggccaacaccatttatgaataatgttataacacatgaaaagatgctcaacatcactaatcatgagaaaatacaaatcaaaaccacaaagagatctcacctctagcttggatgttctgtacgctc

SEQ ID NO: 3279 - DNA, 20 bp, Homo sapiens
gccctattgacccaagtgtg

SEQ ID NO: 3280 - DNA, 20 bp, Homo sapiens
tcaagactttggcctcatca

SEQ ID NO: 3281 - DNA, 159 bp, Homo sapiens
gccctattgacccaagtgtgtaaggggatgaagtgactgctgtgataattactatgagtacctcaaagactgagaggtgaaatagctatatttaatttaatgtaattaagctaatttaatgtaaactgggaaatttacatgatgaggccaaagtcttga

SEQ ID NO: 3282 - DNA, 2001 bp, Homo sapiens
cgtgcagtcagggaggtttcacatcaccaagattcctatcccagaaaagcagatgttcatagctctgggaatggaatgcgacccttgtggggagcctataaatggacgcatgaggggcgcctgtccatgtggataagatagggctataaacgccctcatcttgccacggctcttctaggcctctttagggttaaggcatactcccttctgagaatttgtggtctaactggttgtctagcttcacatcctgtttctatggattgtttgtaaccagcttttgctgcaactgttactgctgattaatatcttgctaatcataggttatggaaagactgtgtttctgttttaaggctctgttagaaattactgatgcacacactatattgtaaattcttatctctgtatactgtacttctgcatacagatgttatgttaaagaattacttcatccccatgtgaccatctcacctcataatcaaatgaccctaaatccttcactaacctacccctgccctcactaaacttaataataaatgctagtatattcagtgcattggcagcaccatgggaccagaaggcggtgacccccctggacccagctttcactatcttgtgtgtgtctattatttcacaacctgccgatccgcctgggaacaaagagagagccctgttgcattgtgggatgctggccaggtcccgcaacacacgcccaactaatttttgtatttttagtagagatggggtttcatcatgttggccaggatggtctcagtctcttgacctcgtgatccgcctgccttggcctcccaaagtgctgggattacaggcatgagccactgtgcctggcccctagccctgttcttaaagggcctcacccgaaggccaataatccaattgggtaattagccaaaaaaaaaaattataactattggatcttcttctggttgtctgtgtgtggctatatatgtgttatgtgtgcaatgtctatttttaaaaagctctaattaattggcctaagaaaaataagtgcttaaatcaaatatttttaagggaaaagtaaaagccatggaaactttcagttcacatgactttaacctttaaaacttagtggcacagtaagattagaaatgtcttaagagttgccaccatatatttttatttgcatttatcgatcaagcaattttatacttatctctgccaaatactataaggtatcaacatttgtcatagaggctacaagactataactcagcccaaacagaataatctttgcttgtgtaatttttttaacaaatgaaacattaatattggtttaataaagatagctacatcttgaactatttagtgaaatgccctaacttctaatcttgtggccttaggcagtctagtccacagacatgaaggaagtttgctttggcaaaggactatcatcatctttaatattaaagagaatttatataaaaaataatttttttttctttgagacagagtcttgctctgttgccaagctggagtgcagtggtgtgatcttggctcactgcaacctccatctcccgggttcaagagattctcttgcctcaacctcctgagtagctgggactattggcacatgccaccacgcccagctaattcttgtatttttaatagagacagggtttcaccatgttggccaggatagtctcgatctcttgacctcatgatccacccacctcagcctcccaaagtgctgggattacaggtgtgcgccaccacgcccaggcaaaaaataatcttatatggtaaattcttgtcctaaagtaaattaactggttaaggaaaggaatgtttacaacaagtcagaaattcgaggcatgtgagagattgtctgaaggtcacgaaaaattttataaaaggcaatttatgcaagaaatgtacaatttaaaagtgattaggcctcctcaatgctttataaaatgccactaataagcttagctgtacaatttgcatggtttgcagctaggt

SEQ ID NO: 3283 - DNA, 20 bp, Homo sapiens
gaaagcccaggatctccagt

SEQ ID NO: 3284 - DNA, 21 bp, Homo sapiens
tgagggcaggagactctacaa

SEQ ID NO: 3285 - DNA, 279 bp, Homo sapiens
gaaagcccaggatctccagtgaagtagtttcaaaaaggaatctggtaagaaaacatacatagatcggatttgatatttactaccctggctactagaaaggaaccctggagattctagctgtctttagctgccaattagatatctggataatgatgctggtgaattacttaactttcaaacatatgtatctgtgtgcctgtgtgttatacatgtatgaatgtgtgtgtgtgtgtgtggtgccaagtacagtgttcagagttgtagagtctcctgccctca

SEQ ID NO: 3286 - DNA, 2001 bp, Homo sapiens
catttctctccatttaaggtaggattgcactcagtaggaaatcctggaatgtgttccactatttttatcatattagctctgtggatataccctttaaccagatataaggtaacaagtgtgtggcacaatcacagagacagaatattgacaggtacagcttccctttgtaaaatctgaaggagaaatggtagaagcaatcaaagcaaagaataaggataacaaaatagccataaagggacaaaaattataaagagatataaaaagtcttgtagtcaaatacaaggattttgtagaaagcccaggatctccagtgaagtagtttcaaaaaggaatctggtaagaaaacatacatagatcggatttgatatttactaccctggctactagaaaggaaccctggagattctagctgtctttagctgccaattagatatctggataatgatgctggtgaattacttaactttcaaacatatgtatctgtgtgcctgtgtgttatacatgtatgaatgtgtgtgtgtgtgtgtggtgccaagtacagtgttcagagttgtagagtctcctgccctcagagttgctcattgtccagctgggagaaacagataagagtacagaactatagtggagtggggtaaatgctataacatgggtgtgcacagtgttcttggaagtacaagttattggaggggagacatgaaaatgaagtaaaaataaataaaatatacaaataaaagtggggaggcagaatacacacatttcaggcaaagggaaaaacatttgccaaataaacaaacaacaaacaaaaaactaagcatttgacagagttgatgacttcttcctctttgaattgctttcttcatttggtttccatgggatcacttcagtagctgctacttctcatattcatttgctattattttatatcttccctatcttccctaacactaagtgttgttagagttccagtgctcagtccttggacatctttttaactctctctctactcattctattgtactcattctattgatgatctcatccatctcatggtattaaagaccatatatattctatgatgccaaaatgtatatctcctgcctgggacttctgtaaaacctaaattcaacctaaaaactgcctacatggcatcatcacttgaaatgtctaattggcatctgaaaataaatatgtccaaagtgaattctttagctccctcctcccaccacctcctccctaaacctgcttaacacacagccttccccatctcagttaatcccaactctatccttcaagttgcctagaaaaaaaaaaaagcttacagtcatccttaattccttttttttttcatcataccacacaaccgatctgtcagcaaatcctgttgttttaaccttcaaaatctaatcacttctcaccatccccatcattatcaccctggtcaaattcaccattgtttcccaccttgattattgccttagcctcctaacatgtctcctgcatccattcttatactcgacactcaattcccatatatcagggaagttctgttttaatatgagtcatatcatatcattactttgctcagaatgctccagtggcttcccatcttattcatagtaaaagtctgtacaatgctttacaaggttgtacccaatatacctcctgccatcactatcgctctctccttttttacctaattcatgtcctatttattcttccctttgttcatttcagctggtctccttgctgatccactaacagaccaaagcatacacccatctcagggtctttattcttgctgctcctttgacctgtgtagatggagggaaggaaagcaggagagaggtaaagatgaagaaaggaaagaagcaagcaagggatggatgatccatgaagtaaatccatttgaataaaggaatgtatttaaataactaggctatgaccaagatagggaggttattcttttattgctcttgtgttaataataattattatgttatt

SEQ ID NO: 3287 - DNA, 23 bp, Homo sapiens
gcaaacctgaaaagaaatgtgac

SEQ ID NO: 3288 - DNA, 20 bp, Homo sapiens
gaacttcctgaggctgggta

SEQ ID NO: 3289 - DNA, 400 bp, Homo sapiens
gcaaacctgaaaagaaatgtgacagactcatagaaaaaaattataaaattttttcaaaaatcagaaaacatatggtttagatttgtgtccccacccaaatctcatgttgaattggaggaaaggcctggtgggagatgattggatcatggggtggatttccctcttgctgttctcatgataatgattctcatgagatctgatggtttaagagtgtgtgtagcacttcccccttcactctctctctcttgccaccatgtaaagaaagtgcttgcttccccttcaccttccaccatgattgtaagtttcctgaggcctcccagtcatgcttcttgttaagccttcagaactgtgagtcaattaaacctcctttctttataaattacccagcctcaggaagttc

SEQ ID NO: 3290 - DNA, 20 bp, Homo sapiens
ccagaggatagagggggaag

SEQ ID NO: 3291 - DNA, 20 bp, Homo sapiens
cactgcattgcaacctgagt

SEQ ID NO: 3292 - DNA, 228 bp, Homo sapiens
ccagaggatagagggggaagaaacatgaaattgtttttcaattggtataaattttctgtaacacgagataaataagttctagagatctgctgcacaacatagtacctacagttaacaatattgtattgtgtactttaaaatatatgtatgtatatatatataaaatataaatatatatatattttttgaggcagagtcttgctcggtcactcaggttgcaatgcagtg

SEQ ID NO: 3293 - DNA, 22 bp, Homo sapiens
tctaccacactggaggaagaaa

SEQ ID NO: 3294 - DNA, 20 bp, Homo sapiens
gtcggatattgccatctgct

SEQ ID NO: 3295 - DNA, 128 bp, Homo sapiens
tctaccacactggaggaagaaataagaaaactcattcattcattcatgtactcaatagccataaacaactgaccctcagaaactcaagatcaacagtggatactaacaagcagatggcaatatccgac

SEQ ID NO: 3296 - DNA, 2001 bp, Homo sapiens
tgtcgcccaagctggagtgcaacagcatgataatcagctcagggcaacctccacctcccgggttcaagcaagtctcctgtctcagcctcccgagtagctgggactatgggcgcccgccaccacgcccggctaatttttgtatttttagtagagacggggtttcaccatattggtcaggctggtcttgaacttctgacctcaagtgatccacccgccatggcctcccaaagtgctgggattacaggcgtgagccaccacatccggcctaatatcctttcaaaaaataagcgcattccatacaaataagaaggttacaataaagtacttcaaagctcaagagccacagtactgaggtatgataactagcatgaggagtcttccaggcttctcttttgtccagtactcactgaagtctcatccgtttttcaggggggcctttagcactcactgtctgttgtacattctttgtggtctccttctcctcaggttttacagtttctggtataggttctgcctctttctttgtttgatccactagatatcaaaagtagattttttgggagggagatatgggtggggggaatgagataaatggttaatatgaatggctcacattttcaaattcatttttaactgcttatctcaagttctagatctagctgtttccccaggcagatgtatacaagaacccagttacaaacctaacaacctgaaaactcaaggaaattaatgatactagacaaaactacatagcatttaagtaagacagtatgtaaaaacaagatatataattattctaacccagtaccatgatggttcaatacctgttttcaataatgtaacagaaaacatcattgtgtaaaaatacagatttgatgaagaaacctcgaatcacagtggcttcctcacacctcctcaatacctactttttccctcccaattcatcttttcactaccacaatcactaccacaatggcaccacctgctgacagttcagcagatctcaaagattaagagtaaaaaactacaatgggagactctagaacaagactgttcaacccaccgcccacgggcagcatgaggcccaggatggctttgaatgtggcccaacacaaatctgtaaacttccttaaaacattatgagacttttttttttttttcagctcatcagccatcattagtgttattttatgtgtgacccaagacaattcttcttccaatgagacccagccccagctctagaaggacaaaatgaccacagctcatttcacatgctatacttgtgattgatttacaagctgtttgaccttatttcaagcgtaataagaatattacatgaaccatacctggaacaggcttttctccaggctttagctataattttttagaaaaaagggagggagaggaagaggaaaaagaagaaaacaggtcaacttggcaaaatttcttcttcctgatgtcatattaataaaatgaaagcttcatccaaattacatttcaaatgactttgtgaagaaaagctactatgtatgtactataaagtaaatttatcattttctacttcttattccccattccagaaaagacacaaatcaaaaactagaacaagatagtcaaccaaccataaaaacacttgaacatttaacaaagacttccacctccacacccaggctacaatgctttataaaaagcagttcagtagaatccaatgggaagaaataataagtctttcaataccccagagtcttatttccttaggggttatgacttatgggaagggagaatgaagtatggatgaaccatgacttttaaagttggtaggcatgggaaatttggagggaaaagagatttctgatgagtctattattaaaaaccaatctataggaaaaaaagataagagcattagaggttagaaacaaggtcaggtccttcactctgcaagcaattctttcacttgattaagctctgtcatctcctttgccccattccccaagttaaatg

SEQ ID NO: 3297 - DNA, 20 bp, Homo sapiens
ggtcaggtccttcactctgc

SEQ ID NO: 3298 - DNA, 20 bp, Homo sapiens
aaggaagttggtggtgttgg

SEQ ID NO: 3299 - DNA, 187 bp, Homo sapiens
ggtcaggtccttcactctgcaagcaattctttcacttgattaagctctgtcatctcctttgccccattccccaagttaaatgctctacgacattcttgtcttcttctacccctcatccgatgacactgtctcccatgtttaaaaacaacaacaacaaaaccaggatgccaacaccaccaacttcctt

SEQ ID NO: 3300 - DNA, 19 bp, Homo sapiens
acgagaatggcgtgaacct

SEQ ID NO: 3301 - DNA, 20 bp, Homo sapiens
gtttgctgtcctgtcctggt

SEQ ID NO: 3302 - DNA, 378 bp, Homo sapiens
acgagaatggcgtgaacctgggaggtggagcttgcagtgagctgagatcgtgccactgcactccagcctgggcgacagagtgagactccgtctcaaaaataataataataataataataataataataataataataataataataataattgggaggaagtaggggaagaagagataaaacaagcttggccattttgataactgttgaggcaggctaaagggtagagggggtttcatttttaattattctctctgctttcatgtttttaaaattaccatacttttctataaagtaaagagtttttattttaagaatcaagagagtctttgagctttctataacgtctagcctagctcaccaggacaggacagcaaac

SEQ ID NO: 3303 - DNA, 20 bp, Homo sapiens
ttgcagtgagctgagatcgt

SEQ ID NO: 3304 - DNA, 20 bp, Homo sapiens
gtttgctgtcctgtcctggt

SEQ ID NO: 3305 - DNA, 255 bp, Homo sapiens
ttgcagtgagctgagatcgtgccactgcactccagcctgggcgacagagtgagactccgtctcaaaaataataataataataataataataataataataataataataataataataattgggaggaagtaggggaagaagagataaaacaagcttggccattttgataactgttgaggcaggctaaagggtagagggggtttcatttttaattattctctctgctttcatgtttttaaaattaccatactttt

SEQ ID NO: 3306 - DNA, 26 bp, Homo sapiens
tctttgagctttctataacgtctagc

SEQ ID NO: 3307 - DNA, 23 bp, Homo sapiens
ttgctgttgtatttgagtcctga

SEQ ID NO: 3308 - DNA, 140 bp, Homo sapiens
tctttgagctttctataacgtctagcctagctcaccaggacaggacagcaaacaagaatcaaggcagcatccctagccaggggcggggaaaaaaaagttgtctttcactggagtacctcaggactcaaatacaacagcaa

SEQ ID NO: 3309 - DNA, 20 bp, Homo sapiens
ccctggcctacctagcatac

SEQ ID NO: 3310 - DNA, 22 bp, Homo sapiens
aactgcacttgaagatggaaca

SEQ ID NO: 3311 - DNA, 155 bp, Homo sapiens
ccctggcctacctagcatacactatgtactcaccaaatgaatggtcaactacacctaacctcttacattctgtagaggtcactcatcaccctactacagctataattcatttatttatttattcaacagactatgttccatcttcaagtgcagtt

SEQ ID NO: 3312 - DNA, 20 bp, Homo sapiens
aactggctttcctgtcctga

SEQ ID NO: 3313 - DNA, 20 bp, Homo sapiens
gggcagggagatttctaaca

SEQ ID NO: 3314 - DNA, 366 bp, Homo sapiens
aactggctttcctgtcctgagttccatcttgtgtcctctgctctcttcaccactacatcacaattccaatagcacctatctctcactacagcagagtcagggaagagaaaaggggaggcttgttctaaagtcatctcatgtgaaaaatgtcatttagtttaaaatttcccttgaaaatcccttaaagagctcctaacaaaaacagggtatatgatcttgtatgtacattgtaaaggtccagaagaattgagactagccatgagaacagcatattcatctattccattccatatctactagactccaaaagctcatttagtagaatggcaggtggatttgctattgctgttagaaatctccctgccc

SEQ ID NO: 3315 - DNA, 21 bp, Homo sapiens
cctgtgacactttcagcaacc

SEQ ID NO: 3316 - DNA, 24 bp, Homo sapiens
cgaaagacttaatggaagaaatgg

SEQ ID NO: 3317 - DNA, 136 bp, Homo sapiens
cctgtgacactttcagcaaccttttgaatgagaatattatctacatgcagtcctcatagtttgtgaagtttcagtaagaaacacaaaacagtgttaattccattccatttacccatttcttccattaagtctttcg

SEQ ID NO: 3318 - DNA, 20 bp, Homo sapiens
taagcacgcacaaccgtaag

SEQ ID NO: 3319 - DNA, 21 bp, Homo sapiens
caaatcccacatgcgattaac

SEQ ID NO: 3320 - DNA, 294 bp, Homo sapiens
taagcacgcacaaccgtaagagttttaaagctaaagtttttcataattacctaaatcacacaatccaaattattggcttgaaattacctttgttattttaagtgtattaaatggtcttttctcacaaaacctactagcaacaaatggaaatgcaggtttcacaaactcaagctaccatattcaattattaagactgtaattcactaaaaaaaaataataaaacagaaaattatgaagacaaaaaagaaaagaacctgaaagagaaattctgaagttaatcgcatgtgggatttg

SEQ ID NO: 3321 - DNA, 20 bp, Homo sapiens
aggctactgccgtcttgtgt

SEQ ID NO: 3322 - DNA, 20 bp, Homo sapiens
cagcgatgaccagaaattga

SEQ ID NO: 3323 - DNA, 354 bp, Homo sapiens
aggctactgccgtcttgtgtaatttttacaccttgaatcctctcactatggaaatcttgtcttgtcgctggtttgccttggttctaaggttctcttttactctgggcagggactctagatctttgattttgtaactgattttggattccagaatcacaacttctttatcaagtcattctctgaaaacaatgccaagttaaagattgtccataaatgtcttaatgagggtatccaattgagagatgtagctagaataacacccatctggctcccctatcttgaatcttctcttcagtatgactttatccatggtcttgccttgattctaatgtcttcaatttctggtcatcgctg

SEQ ID NO: 3324 - DNA, 2001 bp, Homo sapiens
ccagccagtcagcagcacggccagcgtctatacaggcaccggaggctctggttcccagatctccgtgtcccgctccaccggtttccagggcagcttggggtacaggagcctggccatgggatggccagggttctagcaggaatgggaggcatccagaacgaggaggagaccatgcaaagcctgaacctaccctggttcaatgcctgacctcctacctggacagagtgaggagcctggagaccgagaaccagaggctagagagcaaaatccaggagcacctggataagaagggaccccaggtcagagattggggccattacttcaagaccatcgaggacctgagggctcagatcttctcaagtactgtggacaatgcccacattgttctgcagatcgacaatgcccatcttgctgctgatagagtcaagtatgagacagagctggccatgtatcagtctgtggagagcaacatccatgggctctgcaaggtcaatgacaccagtgtcactcggcttcagctacagagattgaggctctcaaggaggagctgctcttcatgaagaaccgtgaagaggaagtaaaggcctacaagcccagactgccagctctgggttgacgatgaaggtagatacccccaaatctcaggacctcgccaagatcacaggagacatcctaatacgaagagctggctcagaagaactgagaggagctagacaagtactggtctcagcagattgaggagaacaccacagtggtcactatgcagtctgccaaggttggggttgctaaggtgacgctcacggagctgagaggtacggtccagtccttggagactgacctggactcgatgagaaatctgaaggccagcttggagaacagcctgagggaggtggaggcctgctataccctgcagatggagcagctcaacaggatcctgctgtacctggagttggagctggcacaggccggggcagagaggcagcaccaggcccaggagtacaaggccctgctgaacatcaaggtcaagctgtaggctgagatcaccacctaccgccgcctgctggaagacagccaggacttcaatcttggtgacgccctggacagcagcaactccatgcaaaccatccaaaagaccccacccgccaggtagtggatggcagagtggtgtctgagaccaacaacatcaaaattctgagacattaagccagcagaagcagggtaccctttgaggagcaggaggccaataaaaagttcagaggtcaaaaaacaaaacaaaattacttgggatgcttgacgttcagtcggtataccaactgtgctcacagaaagaggtagctttgatgcagtgagtcgctctgactgttagtgcttgaagagttgtccttgggcatgctccaagagtcctggtatccaagtatacaactagtggaacttggcttttgaaacatttcctatatgatagttaggctggttgtaccagcctttgcagacaatttgtacaaacaatgtgattatagtagacaccagatttcttttggaaaatctaaaaatctggtgggcagaggatgtccaagcaaccaaccctctataaaaatccctggctcagagtcttatatggacttccctgagcagacatattgaatgcagctgcatttcactgctggatggagggcacactctgtggcccttcacaagcaagagggaaagcataagaaacttgcacatggattcctacagaccccacctgacatgtctttttccagtactaatctggctgcgtacccttactgtgttgtcataacaaatcttagctgtaagtacaaccatatgctaagtctggtgagtcctccagcatagtactgaacatgtatgtggtcttggagaccccccaaacagaaaccaatcaaaaaaacaagttaggtcaggaagtaaataaattatggtattttaaaaagaaaacaatgcctaaagtttacacattttaccttgggcaggggactg

SEQ ID NO: 3325 - DNA, 801 bp, Homo sapiens
ctcagaagaactgagaggagctagacaagtactggtctcagcagattgaggagaacaccacagtggtcactatgcagtctgccaaggttggggttgctaaggtgacgctcacggagctgagaggtacggtccagtccttggagactgacctggactcgatgagaaatctgaaggccagcttggagaacagcctgagggaggtggaggcctgctataccctgcagatggagcagctcaacaggatcctgctgtacctggagttggagctggcacaggccggggcagagaggcagcaccaggcccaggagtacaaggccctgctgaacatcaaggtcaagctgtaggctgagatcaccacctaccgccgcctgctggaagacagccaggacttcaatcttggcgacgccctggacagcagcaactccatgcaaaccatccaaaagaccccacccgccaggtagtggatggcagagtggtgtctgagaccaacaacatcaaaattctgagacattaagccagcagaagcagggtaccctttgaggagcaggaggccaataaaaagttcagaggtcaaaaaacaaaacaaaattacttgggatgcttgacgttcagtcggtataccaactgtgctcacagaaagaggtagctttgatgcagtgagtcgctctgactgttagtgcttgaagagttgtccttgggcatgctccaagagtcctggtatccaagtatacaactagtggaacttggcttttgaaacatttcctatatgatagttaggctggttgtaccagcctttgcaga

SEQ ID NO: 3326 - DNA, 2001 bp, Homo sapiens; identical to SEQ ID NO: 3324

SEQ ID NO: 3327 - DNA, 20 bp, Homo sapiens
tagtggatggcagagtggtg

SEQ ID NO: 3328 - DNA, 20 bp, Homo sapiens
gaacgtcaagcatcccaagt

SEQ ID NO: 3329 - DNA, 152 bp, Homo sapiens
tagtggatggcagagtggtgtctgagaccaacaacatcaaaattctgagacattaagccagcagaagcagggtaccctttgaggagcaggaggccaataaaaagttcagaggtcaaaaaacaaaacaaaattacttgggatgcttgacgttc

SEQ ID NO: 3330 - DNA, 621 bp, Homo sapiens
ctattttgaacagtggtagtgtcctggattacttttcagaaagaagtaatcctttttatgacagaacatgtaataatgaagtggtcaaaatgcagaggctaacattagaacacttgaagtaagttattttaagaaggtagcactttttccaaatacaagttttgcaatgaacagttctttcaaactgtggatcatgaagtgcagagtagaacttttagaagaaaaactggagttttgtttgggtttatgcaaatttgacatgcagggtaactattagtattcacttttaacagaggtcttttctgtataacttcataatgtttaattacaatataacaggtttagatttggatctgatgagtgattttggcaatgctactgttattctcaaccaggcaactataattattgtctcttttatatctagtttatattacaaaagtatttgaaacaactgttgatataattttcctgttagctacatattgaggaggagcttataaaattaaatatctgttatattttaaatggcttttgttatggggcaaatacagctattgagacaacttattgttgcttttaaacataatctgtcaggtaaaaaaatttgttgggatgaag

SEQ ID NO: 3331 - DNA, 20 bp, Homo sapiens
agggatccaagagctgtcaa

SEQ ID NO: 3332 - DNA, 24 bp, Homo sapiens
tgctttcttgcataatctcttctg

SEQ ID NO: 3333 - DNA, 211 bp, Homo sapiens
agggatccaagagctgtcaacccaagaaattcccagcagattgtctatgggaaagaaaacaaaatgataaaggattagaaaaatagaaagaatccaatccaacaaacatttattatacatcaaatgtagtaggcactatgaatataaggatgacatagatcctaaccaacacactctcatgatgtaacagaagagattatgcaagaaagca

SEQ ID NO: 3334 - DNA, 19 bp, Homo sapiens
ggacgtagagcggaagagg

SEQ ID NO: 3335 - DNA, 19 bp, Homo sapiens
ccctgcaccaatctttctg

SEQ ID NO: 3336 - DNA, 189 bp, Homo sapiens
ggacgtagagcggaagagggggcggggcgggcaggagagaggcagggggtggaggtgcgggtgggaggggaggagacgcgagggggcggaaagcgggagaggcgcgggaggcgggaaacgtggggtggggtggggtggggtggggtaggggaatgggaggggacgggacgcagaaagattggtgcaggg

SEQ ID NO: 3337 - DNA, 22 bp, Homo sapiens
ttgcctgtacatttcagtttgg

SEQ ID NO: 3338 - DNA, 21 bp, Homo sapiens
catttctcccattgcctacaa

SEQ ID NO: 3339 - DNA, 365 bp, Homo sapiens
ttgcctgtacatttcagtttgggaattttctgcctgagatggtatgtataaaataggtgtcccaacagaagtatgtgcatgcacagagtaaagttttgagagagaatttttcaggagggcctggttgggagcctagtgggaggacattgcaaaaaggaagagtatcgtgtccaataaaaagtgtgatccataaagctttttgttttgtttttctagttttttgtttccttgtgttttgattaggctagaaggagattaggaagaatagtgacagaatgcagatctgtagataataaaacatatggtatgcatggtaaataagacctggaagctcaacctttattttgtaggcaatgggagaaatg

SEQ ID NO: 3340 - DNA, 20 bp, Homo sapiens
aaaccttagcagcagggaaa

SEQ ID NO: 3341 - DNA, 24 bp, Homo sapiens
acattggtactcttcatttgctta

SEQ ID NO: 3342 - DNA, 123 bp, Homo sapiens
aaaccttagcagcagggaaaaaaaggttgaaaataatagattttataatacagtgtcttttcttttctccagtttgtgctataagttatcttcaagttataagcaaatgaagagtaccaatgt

SEQ ID NO: 3343 - DNA, 2001 bp, Homo sapiens
attcaatgtcatttcacagatcagggttaaaagaagattttaggccgggacagtggctcatgcctataatcccaacactttaggaagccaaggcaggcggatcacctgaggtcaagagttcaagaccagcctggccaatatggtgaaaccctgtctgtactaaaaaaatacaaaaattagccgggcatggtggtgcatgcctgtaatcccagttactcaggaggctgaggcaggagagctgtttgaatccagaaggcggacgttgcagtgagctgagatcgtgccactgcactccagcctgggtgaaagaggaagactctgtctcaaaaaccaaaaaataaaaataaaaataaaaaatataagaagattttaaatattcactatcagccaaataaaccttagcagcagggaaaaaaaggttgaaaataatagattttataatacagtgtcttttcttttctccagtttgtgctataagttatcttcaagttataagcaaatgaagagtaccaatgtatataatttttggatatacagtaaacccatgtaaacaatgtaaaaccatattgtgtatgtgttaacattcagggctttaaaaaaatcctatgtacaaacctgaaaatatttgtctgattcatggacaaatcactcaaacaaacaatttgcagtcttcatttatttatgcattcagctctcagttgtgggtgggtacagaatggccatataatccaatattgtaatacaaagtgaaaagtgatgtaatagatgttatcagtttacagaatatcagtcagttctaaagcccccacggaggtgtggaataatgggaaaggcttctattcttaacatgcttaagtttgtattttagataaataagacatacaggtatacgtatatacactcaaagataaaacaagtaattcataatttttgttgcaaatctattactccccttaccagaaaactatatttacacataagaatttgtcagatctcaaaaacaagattggaaatcatagtgatcattgtatattttaatatagaatgaaaataaatttgactttgaggtatagttgaaatggaaataaatcagatgtgaaattagattgaataagttcaaagtggtaatgaaaataagccttgtatgtacaaattcaataaaagtatttgtctccctacaggcatagcaaacataggtggaaagattttacaaaggtattatggggacaagagttactttattttaaaagcgaatctgccatgcaatttctaattaaccaggaggtggggaatgcctccaaaatggctagctgatgtattactccttatgtagaaacatctacttattgaaggtttcctccaaaacaacgcttgttatcacagaaatcacgggctgtgatgcccaaaactggctacacattccttccagagcatgtatgctttcttctcaagatataagccctgggtctgggggcttgaggtacggagatctacctatcttgcgtatgcccaaaaccacacttgtgcctgtaaattccccataataaattacccaaaaccaacaaagtggatttgtttacctccttctttggtttttcatctcctttggcatttaggagttgctttgccctttcatggaacaggtagaatctttaaattatttggtgatgttcatattgcttattattaaagcaaagcactagaaatacctgaccagactctcagaattcccaaaatacaaaagctggagcccagattaatagttcttgatagagttatacttacaagggtcacggccacatggcagttcaatataacttgttcaaaccacactccatgagatgcagctgtggtaaatattaaggaataaatgaactagagtgggtaatgcagttaccttggttattcaattcacccaagctaatataattctaggtataaaagccgttttaattgggtgtagtggtgcatgctagtagtctcagttacttgggagactga

SEQ ID NO: 3344 - DNA, 22 bp, Homo sapiens
tgaactagagtgggtaatgcag

SEQ ID NO: 3345 - DNA, 25 bp, Homo sapiens
tttggcttaactgactttaagaaac

SEQ ID NO: 3346 - DNA, 425 bp, Homo sapiens
tgaactagagtgggtaatgcagttaccttggttattcaattcacccaagctaatataattctaggtataaaagccgttttaattgggtgtagtggtgcatgctagtagtctcagttacttgggagactgaggggaggattgcttgagtccaggagttctaggctgtagtgcctgaagcccactggatgtctgcactaagtctggcatcaatatggtgaccccctgtgagcaggggacaatcaggttgcctgaggaggagtgaactggcccaggttggaaacctctgtcaaaactcccatgctgatcagtcgtgggacggtgcctgtgaatagccactgcaccccagcccgggcaacataatgagaccctgtctcaaaaataaataaattaattaaattaagtttcttaaagtcagttaagccaaa

SEQ ID NO: 3347 - DNA, 26 bp, Homo sapiens
cgtgtgtgtgtgtgtgtatatatgtg

SEQ ID NO: 3348 - DNA, 27 bp, Homo sapiens
attactttgagacagtgtgttactttg

SEQ ID NO: 3349 - DNA, 399 bp, Homo sapiens
cgtgtgtgtgtgtgtgtatatatgtgtgtgtgtatatatatatacacatatatatgtatatatgtgtgtgtgtgtatatatatacacatatatatgtatatatgtgtatgtgtatatatacacacatatatatgtatatatatgtatatgtgtatatgtgtgtgtgtatatatagtgtatatatatgtgtgtgtgtgtgtgtgtgtgtgtgtgtgtgtgcgtgtatatatatatatgagaaaattagctgggcatggtggcacgcacctgtagccctagctactccagagtctggtgggaggatcacctgagcctggggaagtcaaggctgcagtgagctgtgattgcgccactgcactccagcttgtgtgacaaagtaacacactgtctcaaagtaat

SEQ ID NO: 3350 - DNA, 26 bp, Homo sapiens
cgtgtgtgtgtgtgtgtatatatgtg

SEQ ID NO: 3351 - DNA, 27 bp, Homo sapiens
attactttgagacagtgtgttactttg

SEQ ID NO: 3352 - DNA, 399 bp, Homo sapiens; identical to SEQ ID NO: 3349

SEQ ID NO: 3353 - DNA, 20 bp, Homo sapiens
cccattaggaaggaacaagc

SEQ ID NO: 3354 - DNA, 24 bp, Homo sapiens
ttcgaacaaataaacaaatgggta

SEQ ID NO: 3355 - DNA, 420 bp, Homo sapiens
cccattaggaaggaacaagctctcctagacaggggtgtagccttagaaacaaacaaacaacttttcctttttttttttttttctgagatagtgtctcactttgtcacctaggttacagtacagtggcacaatcatggctcacagcagccacaacctcccaggctcaagcaatcctcccacttcagcctcctgagtagctgggactacaggcatgcaccatcattccaggctaactttaaaaaaaaaactgtagagatggattctcactatgttgccaggctggtctcaaactcctggactcaaggaattctcctaccttggccttccaaagtgctgggattacaggcttgagccactgctcctgccaaaaatttccctaccagtgaatgaggggcatacccatttgtttatttgttcgaa

SEQ ID NO: 3356 - DNA, 2001 bp, Homo sapiens
aacatcaaaataaacctcataaaagtgtacaataacaatatatcgattaaaacaataaatttaaattttttaataaaataaaaggtatgtgtgtatgtgtgtgtttgtgtgtgaataaaagctcaaaggccaggatttttgtctgatattgggaatatggtgcaacacatactgtgacacattcagtaaatagttcttggtgattcaatgcaaaatagtgggtcaaatgtcatttctaagttttctcatgagaatctcagtgactttgtaggttcttgaatctgtataaaatgaaaacttttgacatctcaagctgttgttataacccaagactcatgcatcacgcacttggctcactccctcttgtctataggttacatgcaccggagcatgtgatgggatgataattcccaatgatgaacttgcagggaatgcaggtcaagagagaacttcagaatctttccatttctgattacatgttaacattactaagtgtggcttatttaaccttaaaagccctgcaatataaaaggatatttttgtgttattatttattcattcattcacaaaatagttatgatataacctcaaaaaatatttataatgtgccaatcactgtgctgggtgatggagaaatagcagtgaccaagatagacatagtctcaacatttcagtctagcgagggatacagacaaaaacactgataaaccgtattgtaatcagagctatgagggaggaagcagagtagtctgagagcatgaggagagggtactaaacacatacgggagaaaagggaaggcttcctagaggaagggatgtttaagcagaaacaatgaaagactagtagaagttagccaaatgaaaaggagaggtaagaaaatgcaagcagagggaagagcatgaaccaaagccaagaggcaagagagaagaagaaaatggaaaatgttcggaatagctggaacatcgaatatatgagaagactggatgagagtagattgtcacagaaatcagaagtaagatcattgtaaactatgccaaggaattgagagcagtgggacactaaagaaagattttaaggaggcaagtgacaaggaggcaagatttcaatttagaaatgtgttatcataatctaagcctgaaaagatgatgacctatgctaagtaagtaacagtaacagtaaaaagaaatgaactaaaatgatagatatttaggaggtagaatggataggaattggcaaaaaacatggggtgaggaggaaaagaattcaaaatatctagcttggcaattgggtgatttactgagatacaaaacagttgaaagagcaatttggaaaagagggtagaatagttgcatttagttttaggtgtgttgtgtttgaagtgccagtggatcctccaagtgaagatgtcaactggacaaatataactaagaaaaatccatgaatcccatatataaacttaggagtcctagcagccactgaggagatagtggaacactgtggtggttgagtcaataatatgaaaggaaatcggctgtatagacattttttattgtcttgctgtgggcttgagttaaaatacttttctgatatcctagcctttcttgctaaatgaagacttcccaaaacctggtgtttattacgaagcaagtcctatctgccaagctcttctagatgcttttcattccacgcagctcactatatcactgagtcctcactgtaatcgctacactgggctatatttgaaaaaagtgacttagagagagtggtaatgaaggttaccttgtttttaagaaacaacagcagctggctttttaagtgtttgaactagggtaatgcccaaacctctcttttctttgcagctgccacagacacataaatagtcccatgaactcccttctctaatgctaattcatcactgcaaaaaaattaggcattcttgcagggaagaagagcccagcccagactagcatggtggcaagcccttgcctaaacgtaagtta

SEQ ID NO: 3357 - DNA, 2001 bp, Homo sapiens
aaaacaataaatttaaattttttaataaaataaaaggtatgtgtgtatgtgtgtgtttgtgtgtgaataaaagctcaaaggccaggatttttgtctgatattgggaatatggtgcaacacatactgtgacacattcagtaaatagttcttggtgattcaatgcaaaatagtgggtcaaatgtcatttctaagttttctcatgagaatctcagtgactttgtaggttcttgaatctgtataaaatgaaaacttttgacatctcaagctgttgttataacccaagactcatgcatcacgcacttggctcactccctcttgtctataggttacatgcaccggagcatgtgatgggatgataattcccaatgatgaacttgcagggaatgcaggtcaagagagaacttcagaatctttccatttctgattacatgttaacattactaagtgtggcttatttaaccttaaaagccctgcaatataaaaggatatttttgtgttattatttattcattcattcacaaaatagttatgatataacctcaaaaaatatttataatgtgccaatcactgtgctgggtgatggagaaatagcagtgaccaagatagacatagtctcaacatttcagtctagcgagggatacagacaaaaacactgataaaccgtattgtaatcagagctatgagggaggaagcagagtagtctgagagcatgaggagagggtactaaacacatacgggagaaaagggaaggcttcctagaggaagggatgtttaagcagaaacaatgaaagactagtagaagttagccaaatgaaaaggagaggtaagaaaatgcaagcagagggaagagcatgaaccaaagccaagaggcaagagagaagaagaaaatggaaaatgttcggaatagctggaacatcgaatatatgagaagactggatgagagtagattgtcgcagaaatcagaagtaagatcattgtaaactatgccaaggaattgagaccagtgggacactaaagaaagattttaaggaggcaagtgacaaggaggcaagatttcaatttagaaatgtgttatcataatctaagcctgaaaagatgatgacctatgctaagtaagtaacagtaacagtaaaaagaaatgaactaaaatgatagatatttaggaggtagaatggataggaattggcaaaaaacatggggtgaggaggaaaagaattcaaaatatctagcttggcaattgggtgatttactgagatacaaaacagttgaaagagcaatttggaaaagagggtagaatagttgcatttagttttaggtgtgttgtgtttgaagtgccagtggatcctccaagtgaagatgtcaactggacaaatataactaagaaaaatccatgaatcccatatataaacttaggagtcctagcagccactgaggagatagtggaacactgtggtggttgagtcaataatatgaaaggaaatcggctgtatagacattttttattgtcttgctgtgggcttgagttaaaatacttttctgatatcctagcctttcttgctaaatgaagacttcccaaaacctggtgtttattacgaagcaagtcctatctgccaagctcttctagatgcttttcattccacgcagctcactatatcactgagtcctcactgtaatcgctacactgggctatatttgaaaaaagtgacttagagagagtggtaatgaaggttaccttgtttttaagaaacaacagcagctggctttttaagtgtttgaactagggtaatgcccaaacctctcttttctttgcagctgccacagacacataaatagtcccatgaactcccttctctaatgctaattcatcactgcaaaaaaattaggcattcttgcagggaagaagagcccagcccagactagcatggtggcaagcccttgcctaaacgtaagttaggttgaccacaaaacttcagtgggattccttcaacaccacctcctcta

SEQ ID NO: 3358 - DNA, 20 bp, Homo sapiens
agggtaatgcccaaacctct

SEQ ID NO: 3359 - DNA, 20 bp, Homo sapiens
gaggaggtggtgttgaagga

SEQ ID NO: 3360 - DNA, 220 bp, Homo sapiens
agggtaatgcccaaacctctcttttctttgcagctgccacagacacataaatagtcccatgaactcccttctctaatgctaattcatcactgcaaaaaaattaggcattcttgcagggaagaagagcccagcccagactagcatggtggcaagcccttgcctaaacgtaagttaggttgaccacaaaacttcagtgggattccttcaacaccacctcctc

SEQ ID NO: 3361 - DNA, 2001 bp, Homo sapiens
tcagaatgaactctagagacaggttgaaaagctacagcacccaggtcattgtaaaaccaagaagagattctggcaaaatggatagacaattttgcaacatctggcatgcccatctgtgtcctttcctctacgtggcataaacctgagcaactttggagaaaccccttactccaaggctccaccctcagggatggaaacagaagaatgagccatgcattgaatgttctggcttatctgggggctgcccaagggattagtttctgtctcacctaacagaaatcagtgctgacaggaccaggtcaagcatttggaagccactaaaaacagaggtgagtagcaggttagagtcgcagttccacaggcagacaccagaaggagtaagagatcagaaaaggtttgagaggtcctagatcctccagcagggttgattggtgaaggtctttccctgtatgaagccaaagactaggaaaggtcttcaaatggccaagttctagcaaaacattttaagacatccaaagaaacagagaaatttggcacaaaggatcaaataaaactccagaaatcaattctgaagaaatatgatctactagttgcctgaaaaggaatttaaaataactatcataaagatgctaccaaaaggataacaaacactatcataaagatgctatctaaaagataacaaacactgggccgagtgaacactgataggcaactaaataaaatcagggaaatgatgcacgaacaaaatgagaatatcaacaaggagatagaaattataaaaaaagaaccaaacaaattctgtagctgaaaaatataataacggtacaaaaaatagtagaaggatccaacagcagacttgatcaggcaaaagaaatagtcagcaaactcagagacagatcatgtaaagtcactgagtcagaggagcaagaagaaaaaaaatgaagaaaagtgaagacagcccaagggatttacaaaacactatcaagtagcctaatatatgcattattaaaatctcagaaaaagaatgagagaaagggacagagagcttatatgaacaaataatggctgaaaacttcctaaatctgaggaaaaagaagaacatacagactcaagagctcaattcagaaccctaaccagaataaatccaaaaagaatcacaccaaaacacattgtaatcaaactctaaagtcaaagacaaagagagtaacttgaaagcatgagaaacgcaatttgtcacataaaaggaaacttccataagattatcagtagatttctcagcagaaactacaggttagaagggagtggcatgatatattcaaagtgatgaaaggaaaaaaatagtcaaccaagaatactgtatctggcaaactgttcttccaaaattacgaagaaattaagactttgaaataaacaaaagctgagggaatttattactactagaccttctctataagaaatactaaagggagtccttcaagttgaaatgaaaggacagtagagagcaacacaaagccatatgaaaatagaaggttctctggtaagggtagtacatagccaaatatagaaacctatactgttataatttttgtgcataaaatattaatgacagaaatattttaaaaatagatctgtgttaatgagtatacaatgtataaagaagtagtgtatgacatcagtaatatctggggagagtagagctgcaaaggagcagaattttgtctgcaatgaagttaagctgttatcaatttaaagtagaaggctatcattttgagatgtcttacataactagaatagtaaccacaaaaagctatagaatatacacaaaagaaaatgagaagtaaatccaatcacattgctaccaaaaaaaaatgaaatataaaggaagacaataacagaggaaatgaggaagaaaaaagctataggacatacacaaaacaatgaacaaaatggcaatagtaagtccttccctataggtaattactttaactgtaaatggattaa

SEQ ID NO: 3362 - DNA, 21 bp, Homo sapiens
gccctaaggactacacacaca

SEQ ID NO: 3363 - DNA, 20 bp, Homo sapiens
gccttccaaccatgaacaag

SEQ ID NO: 3364 - DNA, 353 bp, Homo sapiens; identical to SEQ ID NO: 37

SEQ ID NO: 3365 - DNA, 2001 bp, Homo sapiens
tccctatgacataccaaaatctcactttctttcctgccacattagacaagatgcaagcaaaaaatgtacacttagctatgcatttgaggaagaaaaaacatggccagatcccaagggaaggccctgattcagcttacctattcctgctgcactaagagaaagctgaatggaggttcataactctgttcatgttaaacatggatcaattgattccctagaatctggccaatctgtaaacaacccctctctgggaaaaggtgaagattaggaaagaagggaagatactgagcctcctgttggaagtaaacgctcaatgccgccaagtgaaaacagcactcaggcaaaagttttctcagcaaggcaatttacttctatagaaggctgcgtctcacagatggagcaacggcaagagcacaccggacaagggagggtaagggggtcttattcctaacgcagctagtccctacctctgtgtctttcccctattggctagggttggaccacaaagtctaagctaattccaattgcctattttaaagagagtgagggtacaagctggagtggcaaggtgagtagtttccatgggaaggatggttacagagcagatgactaagaatgactaaggacagaacaggtgactaaggatgactacagacaaaagaggtgacagaggctaggaggaggttgtttactgaaactaggggcaaagaggcataaagaacaaggaagttaaactttaaaatggaaaacaaagaacagggaagctaaacatactgacatattggttctttgaagaggaactcagaactcattgtacttaacaatttttctccctcttgaattttaaagggagttaacaggctaaactttgaagaggaatttactgtatcctacactcccttccctctaaacacttgcttctcaaaatgtggtccagggaccagcaatatcagcagcacctgacagcttgttagaaacataatcttggggccggacgcagcggctcacgcctgtaatcccagcactttgggaggccgaggtaggtggatcacgaggtcaggagatcaagacacagtgaaaccctgtctctactaaaaatataaaaaaattagccaggcatggtggcatgtgcctgtagcgccagctacttgggaggctgaggcaggagaatcgcttgaacccgggaggcagaggttgcagtgagccaagatcatgccattgcactccaacctgggtgacagagcgagactctgtctcaaaataagaaaaaaaaaaaaaaaaaaagaaacataatctcgggccccagcctaaattaacagagtcagaaaactgcattttaataagatctccaagcaattcgtatacacattaaagtttgagaagcactgagattcttttttatattttttgtatttttttatttcaatagcttttggggtacaagtggttttttgttacacgaattgtatagtggtgaattctgagattttagtgcacccatcacccaagtagtatacattgtgcctaatgtatagttttgtttttgtttttttttatccctaggccctccccactctccccattctgagtctctaaagtaccactctgtatgcctttgcgtactcatagcttagctctcacttatatatgagaacatacggtttttggttttccacttttatgttacttcacttagaataatggcctctggctccatccaagttgctgcaaaagacgttatttcgttccttttgatggcttagcagtattccatggtatatacataccacattttatttatctactcattagtcaatgggaacacaggttgcttccacatctttgcaattgtgaactgtgctgctataaacatgcatggagaagcactgagtttctgactctgaagttcatgctcagattttctgtcatttgggtcttttctcacttcctaaaatagtgctctgcatatggccaacggttaatggaagaacgtttaagaaa

SEQ ID NO: 3366 - DNA, 2001 bp, Homo sapiens
ctgttcatgttaaacatggatcaattgattccctagaatctggccaatctgtaaacaacccctctctgggaaaaggtgaagattaggaaagaagggaagatactgagcctcctgttggaagtaaacgctcaatgccgccaagtgaaaacagcactcaggcaaaagttttctcagcaaggcaatttacttctatagaaggctgcgtctcacagatggagcaacggcaagagcacaccggacaagggagggtaagggggtcttattcctaacgcagctagtccctacctctgtgtctttcccctattggctagggttggaccacaaagtctaagctaattccaattgcctattttaaagagagtgagggtacaagctggagtggcaaggtgagtagtttccatgggaaggatggttacagagcagatgactaagaatgactaaggacagaacaggtgactaaggatgactacagacaaaagaggtgacagaggctaggaggaggttgtttactgaaactaggggcaaagaggcataaagaacaaggaagttaaactttaaaatggaaaacaaagaacagggaagctaaacatactgacatattggttctttgaagaggaactcagaactcattgtacttaacaatttttctccctcttgaattttaaagggagttaacaggctaaactttgaagaggaatttactgtatcctacactcccttccctctaaacacttgcttctcaaaatgtggtccagggaccagcaatatcagcagcacctgacagcttgttagaaacataatcttggggccggacgcagtggctcacgcctgtaatcccagcactttgggaggccgaggtaggtggatcacgaggtcaggagatcaagacacagtgaaaccctgtctctactaaaaatataaaaaaattagccaggcatggtggcatgtgcctgtagcgccagctacttgggaggctgaggcaggagaatcgcttgaacccaggaggcagaggttgcagtgagccaagatcatgccattgcactccaacctgggtgacagagcgagactctgtctcaaaataagaaaaaaaaaaaaaaaaaaagaaacataatctcgggccccagcctaaattaacagagtcagaaaactgcattttaataagatctccaagcaattcgtatacacattaaagtttgagaagcactgagattcttttttatattttttgtatttttttatttcaatagcttttggggtacaagtggttttttgttacacgaattgtatagtggtgaattctgagattttagtgcacccatcacccaagtagtatacattgtgcctaatgtatagttttgtttttgtttttttttatccctaggccctccccactctccccattctgagtctctaaagtaccactctgtatgcctttgcgtactcatagcttagctctcacttatatatgagaacatacggtttttggttttccacttttatgttacttcacttagaataatggcctctggctccatccaagttgctgcaaaagacgttatttcgttccttttgatggcttagcagtattccatggtatatacataccacattttatttatctactcattagtcaatgggaacacaggttgcttccacatctttgcaattgtgaactgtgctgctataaacatgcatggagaagcactgagtttctgactctgaagttcatgctcagattttctgtcatttgggtcttttctcacttcctaaaatagtgctctgcatatggccaacggttaatggaagaacgtttaagaaattcttgttggcatttatttaattccatttgaaggaagaagaccatttttgggaagccaaaacacgtttaccaatgagtggcttaaacagagacagaagtatactaacaacaagcaaacagaacggttctagacctacacagacaactctgtggagcgggacagatgggcatagtaattctac

SEQ ID NO: 3367 - DNA, 2001 bp, Homo sapiens
gtagactggggggttctttatactttactgtattttccaaagtctctacagcagtgtttctcacactttaataggtaaacaaatcacccagtatgctcgttaaaatgcagcttctgggttagtaggtgtgggattttcagattctgcatttctgataggttctcctgtgatgctgatgatattggcccaaggtctacattttgagtaggaaggttttaaagcagcatatctgaaccaatatactggttaactgagacccaccctcagagtttctgatttcttaagtctggagtaggatcctaggatttgcatttctaactgtttcccaggtgatgctgacactgcaggtctggggccagcactctgacaaccggtgctctagaatctttctttttcttaacattaaggaagggagggcactaaaaaatatgtcaggcttctccattgactccaaaatcaaatccaaactcttcatccaaaagcccccataatccaaccccgtcatttcccactacttctcattaggctataaaatcaaaccactatgccctaaacacacctgagatttcaaacatcaggacttccgctggatttcctcactccggctatgccacttccttctacttcttcatgccaaatcctacccagccttcaaggtcctcaaatgctatttcctccataaagcctcctgatctaccactactcaaaaagctacctctccctccccccctcagggctgcacagcacttttcgttcctccccaatgacaggcaccatctgtacctggtccagcgactctaccggtgggtggtgtatcttcgcctgtagactgggagtttcttgaggtcaggggagtgacttgcctatctttgcctcttagccttagcagatccccagtagacagctgacactcagaaccgaccaaaagaaggaaggaatgggacctcctgaggaagggcacagaactgtcctgtaaatggaaactagaccggacgcacgccaagccgatgacccacagtaacaggtgttctccatctctgatgtctgtgattcatcctgcacagctgcgcgcacacagcacacgcatacacaggctcccagaatacggcgccccacacgctgtaccgcccgtcgcgttctggacgccccggcgaccacacacaccgagacacacctcagcgacaacctggatccacaaaaaggaggccctgcccccttaaaaaatactaacaccttactgcaaagaactagcagctacggcttgcgcctgcgccccttgttccctgccgcaccttttcttgtagttaagaaatctatttctgcacgcatttcgtcgccgccgccccccatccctacacgcacgcacacacacacacacacacgcacacacacacactccccttcccctacacctacccccctccccccacctcctttcagactaggcgcgcctcgcagagcgggattgaatgggaaagagcggggccgtctttgtcattaatcctcccctccttcgggcaagccaagcttcttccgggtcagcgaccatccccgccaccccactcggggccacggtccccccgcagcgctagtcccgggcccgcgagcaccggcccccgccacccgcaggttgcggagggaggagggcgggagcgggcggcgcggagccgggaggcgggggaggggccggcgtccgaggcggcggcggcggcggctggagcagcctctggcagcagcggggagaatgggagtgcggggcgccagaccgccgcggggtgtcacggccgccacgaagcctgcgaggcgcggggccggcgcccgcggcttttaaacccgggaaggcgcggcggcggcggcggcggcgggcagatcgcggcgcgcaccaggcgccggggcggcggccgaatggagagaaagggctcggcggccggggccaaggggaacccgagcccgcccgcggccggagaggggcagcggccaccgccgccgctgtgcgtcccg

SEQ ID NO: 3368 - DNA, 23 bp, Homo sapiens
gaaatctatttctgcacgcattt

SEQ ID NO: 3369 - DNA, 20 bp, Homo sapiens
cgcctagtctgaaaggaggt

SEQ ID NO: 3370 - DNA, 140 bp, Homo sapiens
gaaatctatttctgcacgcatttcgtcgccgccgccccccatccctacacgcacgcacacacacacacacacacgcacacacacacactccccttcccctacacctacccccctccccccacctcctttcagactaggcg

SEQ ID NO: 3371 - DNA, 23 bp, Homo sapiens
gaaatctatttctgcacgcattt

SEQ ID NO: 3372 - DNA, 20 bp, Homo sapiens
cgcctagtctgaaaggaggt

SEQ ID NO: 3373 - DNA, 140 bp, Homo sapiens; identical to SEQ ID NO: 3370

SEQ ID NO: 3374 - DNA, 19 bp, Homo sapiens
caagcttcttccgggtcag

SEQ ID NO: 3375 - DNA, 20 bp, Homo sapiens
gagccctttctctccattcg

SEQ ID NO: 3376 - DNA, 399 bp, Homo sapiens
caagcttcttccgggtcagcgaccatccccgccaccccactcggggccacggtccccccgcagcgctagtcccgggcccgcgagcaccggcccccgccacccgcaggttgcggagggaggagggcgggagcgggcggcgcggagccgggaggcgggggaggggccggcgtccgaggcggcggcggcggcggctggagcagcctctggcagcagcggggagaatgggagtgcggggcgccagaccgccgcggggtgtcacggccgccacgaagcctgcgaggcgcggggccggcgcccgcggcttttaaacccgggaaggcgcggcggcggcggcggcggcgggcagatcgcggcgcgcaccaggcgccggggcggcggccgaatggagagaaagggctc

SEQ ID NO: 3377 - DNA, 21 bp, Homo sapiens
gaagcctccaaaagaatagca

SEQ ID NO: 3378 - DNA, 23 bp, Homo sapiens
tgttcaatgtcaagaagagtcca

SEQ ID NO: 3379 - DNA, 401 bp, Homo sapiens
tggaagcctccaaaagaatagcaagaggacagctagaatgtgctaagagatgtcggtctaaaaacctatttggatgacttgaggggacgcatgaagggtgtgcaggcaatttgcaaagggcaccaggttgtggtctcttctggctgggatttccttttggttggaagagatctggccagttgtgctgggcccctgggtgtratttttgcgtatcttgttttccaggaaattcaaagaaataggtagggatcgttctgtttctacggaattttgaatgatcctgatacaatgattagaaaagatatcctgaccttcctggggagacataggaatctgatctttacagaggctacaaaggaagcatgtattggcctgttgatggactcttcttgacattgaac

SEQ ID NO: 3380 - DNA, 2001 bp, Homo sapiens
aaaatcagtgatgactatttcagaagtcccagctaataggaaagtatcctttcttgtcagattacaaaataatcaatgcctctaatatgtattttcttttgtaaaacactaaaacgtttaaagaagaaaatacacaattacctctaatccagttagaaacccactgtggtgtatttccttcctgtatttttttctgtgaataaatgtaaacagtttacaaagctgaggtcctcctgtgtatacaatcaggtatcctgcttttaatcccagttatttatgtcagaagcattttcacatttcatgaaaatattttcatgaagattattttaaatagcaacagaaaagttttacatgtgtatttatacttctcattggctagaaaggaaggaaagatgatcactggtattgctgttagagccagaacagtgcagcatggcccatgagatatcttttcccctgtgtgcctgctaaaaggaaggagaccagcaactggaggtttattctggaagaaaggccactgacccttcgaccaggtctgcagcaccagctgagtagcccaacaagctccaggttctgggggagtctgaatatatttaatcaaggatccatcctccttctacacaaagctgtgcatagagagacaggactgggttttaggaggaagttggactactagcccagaagtacctggaaaattaagctgtgttgctaagggcatcgctgctccaaacaagaggtggttatgaggcttctggaatacatctaggctcagtgaacccttgtactccacatggaagcctccaaaagaatagcaagaggacagctagaatgtgctaagagatgtcggtctaaaaacctatttggatgacttgaggggacgcatgaagggtgtgcaggcaatttgcaaagggcaccaggttgtggtctcttctggctgggatttccttttggttggaagagatctggccagttgtgctgggcccctgggtgtaatttttgcatatcttgttttccaggaaattcaaagaaataggtagggatcgttctgtttctacggaattttgaatgatcctgatacaatgattagaaaagatatcctgaccttcctggggagacataggaatctgatctttacagaggctacaaaggaagcatgtattggcctgttgatggactcttcttgacattgaacaagacacaggactcccctggggccttggaatgttcagtgtagaaccctttgaagggcagagtcttttgccctacatctgttcctgtggggctgtggtggccctagcagaagtgtgatcaaagggatacaacacacaataactttgttggtattttcaaatgatgttcaaggctcgaatgccagcagtagagatggaaatcaacaaaccatggcattggacctgaaggctaggagcttgtgcctctgtccctgggataccttgtgaccttggataagcccctgccattttactttacctccattttcccatctactcagagctatgtttaggagatttttgttgatcttaccaaaggggcagctaatatccattgatcccaattgaagccttgggatagggatgtggcaaggcctagaaggaagtcacactgggaaatgcctgggatggtgctggtttgaaacaagctttgcttttcagtgcttgtggacacgtcttaaagccatgggatcagagccagccacataatttgcagggcccagcatgaaatgaaatgtaggactctttgttgaaaaggcagggaggaagtgtcgctaaagatcctgaaagataaagcttttctctttcttttgttctctctttctcttgacttgacatggtgttttgcatttgctatttgatgtcattgcaaataaaaaattttaaaatttaattattagcatagattttactattctttatgatgtgtggtgccagttttaaatgaacttataggaacactttacttatatgaggaattataaaaattata

SEQ ID NO: 3381 - DNA, 2001 bp, Homo sapiens
agctccttagtccacctccaagggaaataagtcaggtggcttttagccaggaactctttaggacatcttgaaatcagagtccctacagccaaaatacatgggagtgccccctccaaggcaaggaaattcatctgcaaagcagacaggaaggccaagatgtggagcagccaaaagcagctcccagagctttcactggttgtgggtgacctccagattcactataaggaaatcctctcctcacagctgttctctttcaccaccagactgtgcctactccaaacagctaggatgaaaactgaatgtttcaatcaaccaactagagatttcctaagcccctttgggaaggcagatgtccatatttggaacaaaattttccgtttcacccagatgattagtgtggcccagacacggagcagcaactctaaggtctagctcggacaatggtaccagacttaaaaaaaacaaagataatgctgcagggattaaaggagtttagcctaactgtggtatttatatggccttggaattatttattaccactgtaaagctcactatcttatacagacgtacaatgtcatatccccagcaaaagtgtgaagtggtactaacaagctcaagatttctgtaaaatcagaattttgattttggatttggatatgaccccaaaccctatataggtacatggattcacctgtcaatactaccagcttgtcatcccacatgagctaggcatttccaatcatagggatattcaccaccatctgaagcaaactttttgacaaccaccaccaccaaaacaactataataataatggtatcagtaatgacagaaaggattaccatgatgaggccagcacatagtagatgttccacaaatgtgtttgaaatgaatgaaaatgcttttcccagcatctgtctcttgttagggatccaataaattcaatcattccattaacgtttattgagcacttattatacaccagactccaggcttgggggccgggtatatagcagttaatatgaaggacaagatccccgccttacatgaacttatgtatatataatttcatttgatctgtacaactctgtgagacagaaaagtcaaccttggaacagttaacatcacttgcccatggtcacatagtggtatatggcaaactgggatctctcaaccactgggtctgtaattccaaagcctgcagttttagccattcaccctaccacctccatctttaggggtttcttccttagataataaaacttgtctcactgaaatttcttttaatccatcaatattctactctttgaagcaacacagagtatatatcatctctgtagcaaagacaagctttgacatttttagggtaactctcttgcccatcttccagtctttccttctggcagttagacatccttttactgtgaacgtgccttgtgtgattaggacttccattccatggccatcctgggtggttaaggggaaagtgtcctgtgttctgaaaccaggtcattgtttccctaggtcctgccatgtcagtaggaaggtgacctgaatttgtatggacagtggggagtgagaagccctgtgagtcataatttctaatgaacatagagactgcagaatccccgcccatgtctctcctcttttcttcctcccttgctttagggtgtgtgaattccagttaagaggtcttgagaaatcgaagtagaaatgtgaagagtaggagttcatttcagccattaaagaatatacttggctgggcacagtggctcacagcggtgcagcacttttggagtccaaggtgggtagatcacctgaagtcaggagtttgagaccagtctggccaacatggtgagaaccctgtctctactaaaaatacaaaaattagctgggcatggtggcgcgtgcctataatcccagctactggggaggctgaggcaggagaatcgcttaaacctgggagacggaggttgcggtgagccgagattgcaccactgcac

SEQ ID NO: 3382 - DNA, 2001 bp, Homo sapiens
ctacagccaaaatacatgggagtgccccctccaaggcaaggaaattcatctgcaaagcagacaggaaggccaagatgtggagcagccaaaagcagctcccagagctttcactggttgtgggtgacctccagattcactataaggaaatcctctcctcacagctgttctctttcaccaccagactgtgcctactccaaacagctaggatgaaaactgaatgtttcaatcaaccaactagagatttcctaagcccctttgggaaggcagatgtccatatttggaacaaaattttccgtttcacccagatgattagtgtggcccagacacggagcagcaactctaaggtctagctcggacaatggtaccagacttaaaaaaaacaaagataatgctgcagggattaaaggagtttagcctaactgtggtatttatatggccttggaattatttattaccactgtaaagctcactatcttatacagacgtacaatgtcatatccccagcaaaagtgtgaagtggtactaacaagctcaagatttctgtaaaatcagaattttgattttggatttggatatgaccccaaaccctatataggtacatggattcacctgtcaatactaccagcttgtcatcccacatgagctaggcatttccaatcatagggatattcaccaccatctgaagcaaactttttgacaaccaccaccaccaaaacaactataataataatggtatcagtaatgacagaaaggattaccatgatgaggccagcacatagtagatgttccacaaatgtgtttgaaatgaatgaaaatgcttttcccagcatctgtctcttgttagggatccaataaattcaatcattccattaacgtttattgagcacttattatacaccagactccaggcttgggggctgggtatatagcagttaatatgaaggacaagatccccgccttacatgaacttatgtatatataatttcatttgatctgtacaactctgtgagacagaaaagtcaaccttggaacagttaacatcacttgcccatggtcacatagtggtatatggcaaactgggatctctcaaccactgggtctgtaattccaaagcctgcagttttagccattcaccctaccacctccatctttaggggtttcttccttagataataaaacttgtctcactgaaatttcttttaatccatcaatattctactctttgaagcaacacagagtatatatcatctctgtagcaaagacaagctttgacatttttagggtaactctcttgcccatcttccagtctttccttctggcagttagacatccttttactgtgaacgtgccttgtgtgattaggacttccattccatggccatcctgggtggttaaggggaaagtgtcctgtgttctgaaaccaggtcattgtttccctaggtcctgccatgtcagtaggaaggtgacctgaatttgtatggacagtggggagtgagaagccctgtgagtcataatttctaatgaacatagagactgcagaatccccgcccatgtctctcctcttttcttcctcccttgctttagggtgtgtgaattccagttaagaggtcttgagaaatcgaagtagaaatgtgaagagtaggagttcatttcagccattaaagaatatacttggctgggcacagtggctcacagcggtgcagcacttttggagtccaaggtgggtagatcacctgaagtcaggagtttgagaccagtctggccaacatggtgagaaccctgtctctactaaaaatacaaaaattagctgggcatggtggcgcgtgcctataatcccagctactggggaggctgaggcaggagaatcgcttaaacctgggagacggaggttgcggtgagccgagattgcaccactgcacgccagcctgggcgacagagcaggacaccatctcaaaaaaaaaaaagaatatacttgatgaggaaaataaaaggggagttctt

SEQ ID NO: 3383 - DNA, 2001 bp, Homo sapiens
attttggatttggatatgaccccaaaccctatataggtacatggattcacctgtcaatactaccagcttgtcatcccacatgagctaggcatttccaatcatagggatattcaccaccatctgaagcaaactttttgacaaccaccaccaccaaaacaactataataataatggtatcagtaatgacagaaaggattaccatgatgaggccagcacatagtagatgttccacaaatgtgtttgaaatgaatgaaaatgcttttcccagcatctgtctcttgttagggatccaataaattcaatcattccattaacgtttattgagcacttattatacaccagactccaggcttgggggctgggtatatagcagttaatatgaaggacaagatccccgccttacatgaacttatgtatatataatttcatttgatctgtacaactctgtgagacagaaaagtcaaccttggaacagttaacatcacttgcccatggtcacatagtggtatatggcaaactgggatctctcaaccactgggtctgtaattccaaagcctgcagttttagccattcaccctaccacctccatctttaggggtttcttccttagataataaaacttgtctcactgaaatttcttttaatccatcaatattctactctttgaagcaacacagagtatatatcatctctgtagcaaagacaagctttgacatttttagggtaactctcttgcccatcttccagtctttccttctggcagttagacatccttttactgtgaacgtgccttgtgtgattaggacttccattccatggccatcctgggtggttaaggggaaagtgtcctgtgttctgaaaccaggtcattgtttccctaggtcctgccatgtcagtaggaaggtgacctgaatttgtatggacagtggggagtgagaagccctgtgagtcataatttctaatgaacatagagactgcagaatccccgcccatgtctctcctcttttcttcctcccttgctttagggtgtgtgaattccagttaagaggtcttgagaaatcgaagtagaaatgtgaagagtaggagttcatttcagccattaaagaatatacttggctgggcacagtggctcacagcggtgcagcacttttggagtccaaggtgggtagatcacctgaagtcaggagtttgagaccagtctggccaacatggtgagaaccctgtctctactaaaaatacaaaaattagctgggcatggtggcgcgtgcctataatcccagctactggggaggctgaggcaggagaatcgcttaaacctgggagacggaggttgcggtgagccgagattgcaccactgcacgccagcctgggcgacagagcaggacaccatctcaaaaaaaaaaaagaatatacttgatgaggaaaataaaaggggagttctttgaaggctaaaatttccccaattctcttcagacatcttcttaagaacgtagcagaagtggggcttagtgaaaagggacctggactgcaagttctgtctctaactttctgtgtgccttggatcaaagaattttacctcttggaccatggtgttctgattttcagaaaattaagggttgaattctaagatctctaatctcctttccaggtcttaaagaaaaattctccacatcattctttctgaactgtgtggccattacatggaatagagaagttctatgtgtgcttagagatacgagtctccaaaacctatattacttgaaaaggcagagtgtagaacagtctttaatatgattttctttgtgtagaattttaataagagaataaacatatatgctagtacagtgttcgcattcaagaaaattgtctcaagtcataccagagaagcagttaactgttacctttgaaaaaagaggctaggcaaggaatagggcagagagattttaacttttttttttttctttttttgagacatagtctcattctgtcacccaggctgga

SEQ ID NO: 3384 - DNA, 2001 bp, Homo sapiens
ttgacaaccaccaccaccaaaacaactataataataatggtatcagtaatgacagaaaggattaccatgatgaggccagcacatagtagatgttccacaaatgtgtttgaaatgaatgaaaatgcttttcccagcatctgtctcttgttagggatccaataaattcaatcattccattaacgtttattgagcacttattatacaccagactccaggcttgggggctgggtatatagcagttaatatgaaggacaagatccccgccttacatgaacttatgtatatataatttcatttgatctgtacaactctgtgagacagaaaagtcaaccttggaacagttaacatcacttgcccatggtcacatagtggtatatggcaaactgggatctctcaaccactgggtctgtaattccaaagcctgcagttttagccattcaccctaccacctccatctttaggggtttcttccttagataataaaacttgtctcactgaaatttcttttaatccatcaatattctactctttgaagcaacacagagtatatatcatctctgtagcaaagacaagctttgacatttttagggtaactctcttgcccatcttccagtctttccttctggcagttagacatccttttactgtgaacgtgccttgtgtgattaggacttccattccatggccatcctgggtggttaaggggaaagtgtcctgtgttctgaaaccaggtcattgtttccctaggtcctgccatgtcagtaggaaggtgacctgaatttgtatggacagtggggagtgagaagccctgtgagtcataatttctaatgaacatagagactgcagaatccccgcccatgtctctcctcttttcttcctcccttgctttagggtgtgtgaattccagttaagaggtcttgagaaatcgaagtagaaatgtgaagagtaggagttcatttcagccattaaagaatatacttggctgggcacagtggctcacagcggtgcagcacttttggagtccaaggtgggtagatcacctgaagtcaggagtttgagaccagtctggccaacatggtgagaaccctgtctctactaaaaatacaaaaattagctgggcatggtggcgcgtgcctataatcccagctactggggaggctgaggcaggagaatcgcttaaacctgggagacggaggttgcggtgagccgagattgcaccactgcacgccagcctgggcgacagagcaggacaccatctcaaaaaaaaaaaagaatatacttgatgaggaaaataaaaggggagttctttgaaggctaaaatttccccaattctcttcagacatcttcttaagaacgtagcagaagtggggcttagtgaaaagggacctggactgcaagttctgtctctaactttctgtgtgccttggatcaaagaattttacctcttggaccatggtgttctgattttcagaaaattaagggttgaattctaagatctctaatctcctttccaggtcttaaagaaaaattctccacatcattctttctgaactgtgtggccattacatggaatagagaagttctatgtgtgcttagagatacgagtctccaaaacctatattacttgaaaaggcagagtgtagaacagtctttaatatgattttctttgtgtagaattttaataagagaataaacatatatgctagtacagtgttcgcattcaagaaaattgtctcaagtcataccagagaagcagttaactgttacctttgaaaaaagaggctaggcaaggaatagggcagagagattttaacttttttttttttctttttttgagacatagtctcattctgtcacccaggctggagtgtaagtagcacgttatcagctcactgcaacctctgccacctggattcaagcgattctcctgcctcagcctgccgagtagctgggattaccagcgtgcgccaccatgtccagctaactttttgtatttttagt

SEQ ID NO: 3385 - DNA, 2001 bp, Homo sapiens
cccatggtcacatagtggtatatggcaaactgggatctctcaaccactgggtctgtaattccaaagcctgcagttttagccattcaccctaccacctccatctttaggggtttcttccttagataataaaacttgtctcactgaaatttcttttaatccatcaatattctactctttgaagcaacacagagtatatatcatctctgtagcaaagacaagctttgacatttttagggtaactctcttgcccatcttccagtctttccttctggcagttagacatccttttactgtgaacgtgccttgtgtgattaggacttccattccatggccatcctgggtggttaaggggaaagtgtcctgtgttctgaaaccaggtcattgtttccctaggtcctgccatgtcagtaggaaggtgacctgaatttgtatggacagtggggagtgagaagccctgtgagtcataatttctaatgaacatagagactgcagaatccccgcccatgtctctcctcttttcttcctcccttgctttagggtgtgtgaattccagttaagaggtcttgagaaatcgaagtagaaatgtgaagagtaggagttcatttcagccattaaagaatatacttggctgggcacagtggctcacagcggtgcagcacttttggagtccaaggtgggtagatcacctgaagtcaggagtttgagaccagtctggccaacatggtgagaaccctgtctctactaaaaatacaaaaattagctgggcatggtggcgcgtgcctataatcccagctactggggaggctgaggcaggagaatcgcttaaacctgggagacggaggttgcggtgagccgagattgcaccactgcacgccagcctgggcgacagagcaggacaccatctcaaaaaaaaaaaagaatatacttgatgaggaaaataaaaggggagttctttgaaggctaaaatttccccaattctcttcagacatcttcttaagaacgtagcagaagtggggcttagtgaaaagggacctggactgcaagttctgtctctaactttctgtgtgccttggatcaaagaattttacctcttggaccatggtgttctgattttcagaaaattaagggttgaattctaagatctctaatctcctttccaggtcttaaagaaaaattctccacatcattctttctgaactgtgtggccattacatggaatagagaagttctatgtgtgcttagagatacgagtctccaaaacctatattacttgaaaaggcagagtgtagaacagtctttaatatgattttctttgtgtagaattttaataagagaataaacatatatgctagtacagtgttcgcattcaagaaaattgtctcaagtcataccagagaagcagttaactgttacctttgaaaaaagaggctaggcaaggaatagggcagagagattttaacttttttttttttctttttttgagacatagtctcattctgtcacccaggctggagtgtaagtagcacgttatcagctcactgcaacctctgccacctggattcaagcgattctcctgcctcagcctgccgagtagctgggattaccagcgtgcgccaccatgtccagctaactttttgtatttttagtagagatggggtttcgctatgttggccaggatggcctctaactcccagcctcaagtgatccccctgccttggcctcccagcatgctgggattacaggcgtgagccactgcacccagcctaactttttactttaaatctttctgtaatgtttgacttctctacctacatacattattacttttttttaagaaaaatgatgacatgggttatctgtgtagagaaattatgagtaatttgcattttaaaaatattcctgaagaaaacataacctacaaacataattttaatgccattctgggtattatcatgccctgtctatacttgtcaagcaacattatcccacaaaaaaaaaagt

SEQ ID NO: 3386 - DNA, 24 bp, Homo sapiens
gatgaggaaaataaaaggggagtt

SEQ ID NO: 3387 - DNA, 25 bp, Homo sapiens
ttaactgcttctctggtatgacttg

SEQ ID NO: 3388 - DNA, 401 bp, Homo sapiens
gtctctaactttctgtgtgccttggatcaaagaattttacctcttggaccatggtgttctgattttcagaaaattaagggttgaattctaagatctctaatctcctttccaggtcttaaagaaaaattctccacatcattctttctgaactgtgtggccattacatggaatagagaagttctatgtgtgcttagagatackagtctccaaaacctatattacttgaaaaggcagagtgtagaacagtctttaatatgattttctttgtgtagaattttaataagagaataaacatatatgctagtacagtgttcgcattcaagaaaattgtctcaagtcataccagagaagcagttaactgttacctttgaaaaaagaggctaggcaaggaatagggcaga

SEQ ID NO: 3389 - DNA, 2001 bp, Homo sapiens
ccattccatggccatcctgggtggttaaggggaaagtgtcctgtgttctgaaaccaggtcattgtttccctaggtcctgccatgtcagtaggaaggtgacctgaatttgtatggacagtggggagtgagaagccctgtgagtcataatttctaatgaacatagagactgcagaatccccgcccatgtctctcctcttttcttcctcccttgctttagggtgtgtgaattccagttaagaggtcttgagaaatcgaagtagaaatgtgaagagtaggagttcatttcagccattaaagaatatacttggctgggcacagtggctcacagcggtgcagcacttttggagtccaaggtgggtagatcacctgaagtcaggagtttgagaccagtctggccaacatggtgagaaccctgtctctactaaaaatacaaaaattagctgggcatggtggcgcgtgcctataatcccagctactggggaggctgaggcaggagaatcgcttaaacctgggagacggaggttgcggtgagccgagattgcaccactgcacgccagcctgggcgacagagcaggacaccatctcaaaaaaaaaaaagaatatacttgatgaggaaaataaaaggggagttctttgaaggctaaaatttccccaattctcttcagacatcttcttaagaacgtagcagaagtggggcttagtgaaaagggacctggactgcaagttctgtctctaactttctgtgtgccttggatcaaagaattttacctcttggaccatggtgttctgattttcagaaaattaagggttgaattctaagatctctaatctcctttccaggtcttaaagaaaaattctccacatcattctttctgaactgtgtggccattacatggaatagagaagttctatgtgtgcttagagatacgagtctccaaaacctatattacttgaaaaggcagagtgtagaacagtctttaatatgattttctttgtgtagaattttaataagagaataaacatatatgctagtacagtgttcgcattcaagaaaattgtctcaagtcataccagagaagcagttaactgttacctttgaaaaaagaggctaggcaaggaatagggcagagagattttaacttttttttttttctttttttgagacatagtctcattctgtcacccaggctggagtgtaagtagcacgttatcagctcactgcaacctctgccacctggattcaagcgattctcctgcctcagcctgccgagtagctgggattaccagcgtgcgccaccatgtccagctaactttttgtatttttagtagagatggggtttcgctatgttggccaggatggcctctaactcccagcctcaagtgatccccctgccttggcctcccagcatgctgggattacaggcgtgagccactgcacccagcctaactttttactttaaatctttctgtaatgtttgacttctctacctacatacattattacttttttttaagaaaaatgatgacatgggttatctgtgtagagaaattatgagtaatttgcattttaaaaatattcctgaagaaaacataacctacaaacataattttaatgccattctgggtattatcatgccctgtctatacttgtcaagcaacattatcccacaaaaaaaaaagtttgaatgcctcacactttctcttaatatctcataaaaagacttgtctccctttctgcagtggccaccatcccagtccacacaaagggctagatcctggcagcatggtaccccacagagtaggagcatgccccctagactctgttgcacattagtgacagtttgaatcttctggtgaggcaaagaagagagttgagtcagcacttgtgatgtaaactggttctgaatgttagtcatatgtctctggtgtcgaggaaggcatggtgtaggtgctcagcatccaaggttcttgttagctcctgagtctagaaattccgcatgt

SEQ ID NO: 3390 - DNA, 20 bp, Homo sapiens
acaaagcagtctgggcatct

SEQ ID NO: 3391 - DNA, 19 bp, Homo sapiens
ggacattggtgcaatggaa

SEQ ID NO: 3392 - DNA, 387 bp, Homo sapiens
acaaagcagtctgggcatcttttcatctacgtgtgtgcctgctactgacctctaagcttcaccttccccacctgaagcagttgatgaagccagtctcctccaaaaagataatttattcctttaaactctgctatagatattacaaattcttcacccatacagaaggagcagaacttttaaaagaaaaaataattcttcaccctgatacacacacacacacacacacacacacacacacacacatttatttttcacaacattcaggtttatactgtacaaactttagcaaccttcatgtttttccaccagtgttttcattgaaaatatttttcaccgttccacagcatgattgtaatggctgtgtaatgttccattgcaccaatgtcc

SEQ ID NO: 3393 - DNA, 20 bp, Homo sapiens
tcacccatacagaaggagca

SEQ ID NO: 3394 - DNA, 19 bp, Homo sapiens
atgctgtggaacggtgaaa

SEQ ID NO: 3395 - DNA, 197 bp, Homo sapiens
tcacccatacagaaggagcagaacttttaaaagaaaaaataattcttcaccctgatacacacacacacacacacacacacacacacacacacatttatttttcacaacattcaggtttatactgtacaaactttagcaaccttcatgtttttccaccagtgttttcattgaaaatatttttcaccgttccacagcat

SEQ ID NO: 3396 - DNA, 20 bp, Homo sapiens
cagcaggcaggagaaatagg

SEQ ID NO: 3397 - DNA, 21 bp, Homo sapiens
tcagagagttagcaccctcca

SEQ ID NO: 3398 - DNA, 390 bp, Homo sapiens
cagcaggcaggagaaataggtattggagtgaacaaagaaacggctacttgtgggccagacacggtggctcacacctgtaatcccagtgctttgggaggccgaggcgggcagatcacctgaggtcaggagttcaagaccagcctgggtaacatggtgaaaccccatctctactaaaaatacaaaaattagccagacctggtggcaggcacctgtaatcccagctacttgggaggctgaggcaggagaattgcttgaacccaggaggcagaggttgcagtgagctgagatagtgccactgcactccagcttgggcgacagagcgagactccatctcaaacaaacaaacaaacaaacaaagaaacagccacttggagggtgctaactctctga

SEQ ID NO: 3399 - DNA, 20 bp, Homo sapiens
aaaggatgaactattggtgc

SEQ ID NO: 3400 - DNA, 25 bp, Homo sapiens
  misc_feature 21: n = A,T,C or G
tttacttgtacccagtatgtntctg

SEQ ID NO: 3401 - DNA, 319 bp, Homo sapiens; identical to SEQ ID NO: 32
  misc_feature 290, 296: n = A,T,C or G

SEQ ID NO: 3402 - DNA, 18 bp, Homo sapiens
cctggcccattcatgcta

SEQ ID NO: 3403 - DNA, 20 bp, Homo sapiens
atatggtttgcccagcaatg

SEQ ID NO: 3404 - DNA, 401 bp, Homo sapiens
cagagcagtgcctggcccattcatgctaaataaagatgacctgctcttcctcttattccctttctgggaggatggatggatactgtccactggtgcagggccatattctcttgagtgcatcatgcagcacctcatccttctgctccttttccccatctccttggccggggttcttattctccaggggaatatttcaaatcrctaacaagagaagtatccaaatgtcacaagttgacagcgtaacagagaacaattatttgcacacatgtgcagatttccagctctaggacttggccatctgatacctgtctgcccttgtgggtagtgggtgaaaatctactttagatagaaaatctactttaaattacgctgtagctttgtttatgtaccacatattgtat

SEQ ID NO: 3405 - DNA, 2001 bp, Homo sapiens
ttgcaagcactagctaagcaaagataggtgttgtttcaggaagaaaccagaaacgtgtcatgtcagccctgttaggataacagtagactctgaatggaattggagatgctggtggttttagaacttaggaaaaaaagcagccgcagcaggaggaggggaaactttgcagttggttttgtttgcttgttttttgtttttctctctgaatgtaaaggaactagtgggagagaaggttctggagggttacataggaagtttccggatgagtatttacgtataaagtgagaacagtttagcacaattagggtctcacacttaagccctacaggaagcagtacccatgcctcaaatatgtctaatgaaggaattgagttagaatcattacaggcaggtaagcatcctaggagggcagtgtgtgtgatggttaaaagcacagtctcaggtgccagatgacctaaattcaaatcctggctctgacacttactagcattgtgactttgggcaagtgacttgacttcctagggcctccattttcctatctgaaaaaaatgggcaaaatactagaagctagaatagattgctgtcaagattaaatgagttaatgctcagagcagtgcctggcccattcatgctaaataaagatgacctgctcttcctcttattccctttctgggaggatggatggatactgtccactggtgcagggccatattctcttgagtgcatcatgcagcacctcatccttctgctccttttccccatctccttggccggggttcttattctccaggggaatatttcaaatcactaacaagagaagtatccaaatgtcacaagttgacagcgtaacagagaacaattatttgcacacatgtgcagatttccagctctaggacttggccatctgatacctgtctgcccttgtgggtagtgggtgaaaatctactttagatagaaaatctactttaaattacgctgtagctttgtttatgtaccacatattgtatataggactcaagatggaaattttctccaattcatgtacacattgctgggcaaaccatatttgataagtgactttctaaagaactagtatttatgagaatccatttttgtcccagcactgtgagaagcatgtaatgtgcattaattatctcatttcatcatcataagcgttcccccaaagttcctatttaacatgggaagaataagacccagggtgatcatataactcgccctcgggcctgtgctagtgagtggcagagctcagattccagctcaagactgcatctctagacccagcattagtcttcagccagggcacccagagctggtacaatactgtttgcctatttggtttggttatgatctataccagtcattcaatattcttaatatcagctctgtccagatcccaaacttcttccactttactactatgtcattgcttcttgaaataaatttgaaagcaaatcaaataatttggcaaacttttgggaaaattttcccctaggaacccaatggccatttcctgggcccatctcacaaagcagtgactagcaaggtatattagtttcctaaggctgctgtaatatcacacactgggtgacttaaaataacagaaattcattgtcttgtcattctagaggctagaagtgaaacatcaaggtgtcggcagggttggttccctctgagggctgtgaggaagaatctgttccaagcctctctcctaacttctggtagccccaggcactcactggctttgtagatagccgtcttcctagatcttattgcatcatctttccactctgtatctgtctctgtgtccaaatttctcctttttataaggacactagtcaaattggattagggcccattctaactatttcattttaacttgatcatctctgcaaagaccctgtctccaaataaagtgacattcttaggtactgagggtgaggactgtaacgtatcctgtacaaatggatacggtgcaacccc

SEQ ID NO: 3406 - DNA, 2001 bp, Homo sapiens
atgagttaatgctcagagcagtgcctggcccattcatgctaaataaagatgacctgctcttcctcttattccctttctgggaggatggatggatactgtccactggtgcagggccatattctcttgagtgcatcatgcagcacctcatccttctgctccttttccccatctccttggccggggttcttattctccaggggaatatttcaaatcactaacaagagaagtatccaaatgtcacaagttgacagcgtaacagagaacaattatttgcacacatgtgcagatttccagctctaggacttggccatctgatacctgtctgcccttgtgggtagtgggtgaaaatctactttagatagaaaatctactttaaattacgctgtagctttgtttatgtaccacatattgtatataggactcaagatggaaattttctccaattcatgtacacattgctgggcaaaccatatttgataagtgactttctaaagaactagtatttatgagaatccatttttgtcccagcactgtgagaagcatgtaatgtgcattaattatctcatttcatcatcataagcgttcccccaaagttcctatttaacatgggaagaataagacccagggtgatcatataactcgccctcgggcctgtgctagtgagtggcagagctcagattccagctcaagactgcatctctagacccagcattagtcttcagccagggcacccagagctggtacaatactgtttgcctatttggtttggttatgatctataccagtcattcaatattcttaatatcagctctgtccagatcccaaacttcttccactttactactatgtcattgcttcttgaaataaatttgaaagcaaatcaaataatttggcaaacttttgggaaaattttcccctaggaacccaatggccatttcctgggcccatctcacaaagcagtgactagcaaggtatattagtttcctaaggctgctgtaatatcacacactgggtgacttaaaataacagaaattcattgtcttgtcattctagaggctagaagtgaaacatcaaggtgtcggcagggttggttccctctgagggctgtgaggaagaatctgttccaagcctctctcctaacttctggtagccccaggcactcactggctttgtagatagccgtcttcctagatcttattgcatcatctttccactctgtatctgtctctgtgtccaaatttctcctttttataaggacactagtcaaattggattagggcccattctaactatttcattttaacttgatcatctctgcaaagaccctgtctccaaataaagtgacattcttaggtactgagggtgaggactgtaacgtatcctgtacaaatggatacggtgcaaccccaaacagtgaggcagccttgtagagtaggttcttccttctcgctgctggccccagatgggtctggtcttccttccatttagcccatgtttcccttctgttcagcaggtaaaagcaaactatagtgagttagctataagaagaaaaccagtgattgcatgaacttgttcttcctttcatctggtttccctttatctcatgccagtgggtggcgttttgccctgcatgcaccaggaaacacaaaaacaaaacaggtgccagagtgaggagaactcaacatgctttagcctgaggtctcagcgtggttgctggggggaacatcacacttaggattttccgtctgtgtgcatgagtgtcgcgggggctctttgagtagctgattctctatttgctaaacacgacccctctgtgggcctcagaaggcctgccaattcttttcgtaagatcacaccctaaccgcctaaggctggcagtggaggaatctgtacttgggaggggtggttggagatttgcagcttcaattcttgtcccccagatttgcctttctcttgtaagttcactggccacctctgctatcaccctgtttggctcaagga

SEQ ID NO: 3407 - DNA, 808 bp, Homo sapiens
aggaagaacaagttcatgcaatcactggttttcttcttatagctaactcactatagtttgcttttacctgctgaacagaagggaaacatgggctaaatggaaggaagaccagacccatctggggccagcagcgagaaggaagaacctactctacaaggctgcctcactgtttggggttgcaccgtatccatttgtacaggatacgttacagtcctcaccctcagtacctaagaatgtcactttatttggagacagggtctttgcagagatgatcaagttaaaatgaaatagttagaatgggccctaatccaatttgactagtgtccttataaaaaggagaaatttggacacagagacagatacagagtggaaagatgatgcaataagatctaggaagacggctatctacaaagccagtgagtgcctggggctaccagaagttaggagagaggcttggaacagattcttcctcacagccctcagagggaaccaaccctgccgacaccttgatgtttcacttctagcctctagaatgacaagacaatgaatttctgttattttaagtcacccagtgtgtgatattacagcagccttaggaaactaatataccttgctagtcactgctttgtgagatgggcccaggaaatggccattgggttcctaggggaaaattttcccaaaagtttgccaaattatttgatttgctttcaaatttatttcaagaagcaatgacatagtagtaaagtggaagaagtttgggatctggacagagctgatattaagaatattgaatgactggtatagatca

SEQ ID NO: 3408 - DNA, 2001 bp, Homo sapiens
ccccaaagttcctatttaacatgggaagaataagacccagggtgatcatataactcgccctcgggcctgtgctagtgagtggcagagctcagattccagctcaagactgcatctctagacccagcattagtcttcagccagggcacccagagctggtacaatactgtttgcctatttggtttggttatgatctataccagtcattcaatattcttaatatcagctctgtccagatcccaaacttcttccactttactactatgtcattgcttcttgaaataaatttgaaagcaaatcaaataatttggcaaacttttgggaaaattttcccctaggaacccaatggccatttcctgggcccatctcacaaagcagtgactagcaaggtatattagtttcctaaggctgctgtaatatcacacactgggtgacttaaaataacagaaattcattgtcttgtcattctagaggctagaagtgaaacatcaaggtgtcggcagggttggttccctctgagggctgtgaggaagaatctgttccaagcctctctcctaacttctggtagccccaggcactcactggctttgtagatagccgtcttcctagatcttattgcatcatctttccactctgtatctgtctctgtgtccaaatttctcctttttataaggacactagtcaaattggattagggcccattctaactatttcattttaacttgatcatctctgcaaagaccctgtctccaaataaagtgacattcttaggtactgagggtgaggactgtaacgtatcctgtacaaatggatacggtgcaaccccaaacagtgaggcagccttgtagagtaggttcttccttctcgctgctggccccagatgggtctggtcttccttccatttagcccatgtttcccttctgttcagcaggtaaaagcaaactatagtgagttagctataagaagaaaaccagtgattgcatgaacttgttcttcctttcatatggtttccctttatctcatgccagtgggtggcgttttgccctgcatgcaccaggaaacacaaaaacaaaacaggtgccagagtgaggagaactcaacatgctttagcctgaggtctcagcgtggttgctggggggaacatcacacttaggattttccgtctgtgtgcatgagtgtcgcgggggctctttgagtagctgattctctatttgctaaacacgacccctctgtgggcctcagaaggcctgccaattcttttcgtaagatcacaccctaaccgcctaaggctggcagtggaggaatctgtacttgggaggggtggttggagatttgcagcttcaattcttgtcccccagatttgcctttctcttgtaagttcactggccacctctgctatcaccctgtttggctcaaggaaggctgtttctcctctagcacttcttcccacgccttgatagaggcttgtcttcattctccacaatttggctgattccaggccactgcatttattcagccttttcagaagacccaaaggccagaaagttaataatatttctttcaatggagcctctagatatggttgtctgagagctcaggccctttgccatgcatcttccaccctgtacctcttctgctgccaagtgactacatctttgaatccaagtatatccacagagtccaggccaggctcccttgccagtcagtccaaaacctacctttccaactcaacagcctcctctgctcatgatgactaatggtggagatgtttactcccttcagggaaggtctcaccccagtgccatgacttgggaagacccacatcagaacataatccaatctctatgccaaaaaaaaaaaaaaaaaaaatccacacagcaggaatctaattgttgtcttacagaagccctcttgatcactgctttaccagtctgattgtcctccccaacaaaagatacctgaccttgattaatagggagaaaggaaatccttttgaagaggagc

SEQ ID NO: 3409 - DNA, 624 bp, Homo sapiens
aagggcctgagctctcagacaaccatatctagaggctccattgaaagaaatattattaactttctggcctttgggtcttctgaaaaggctgaataaatgcagtggcctggaatcagccaaattgtggagaatgaagacaagcctctatcaaggcgtgggaagaagtgctagaggagaaacagccttccttgagccaaacagggtgatagcagaggtggccagtgaacttacaagagaaaggcaaatctgggggacaagaattgaagctgcaaatctccaaccacccctcccaagtacagattcctccactgccagccttaggcggttagggtgtgatcttacgaaaagaattggcaggccttctgaggcccacagaggggtcgtgtttagcaaatagagaatcagctactcaaagagcccccgcgacactcatgcacacagacggaaaatcctaagtgtgatgttccccccagcaaccacgctgagacctcaggctaaagcatgttgagttctcctcactctggcacctgttttgtttttgtgtttcctggtgcatgcagggcaaaacgccacccactggcatgagataaagggaaaccagatgaaaggaagaacaagttcatg

SEQ ID NO: 3410 - DNA, 567 bp, Homo sapiens
ggtacagggtggaagatgcatggcaaagggcctgagctctcagacaaccatatctagaggctccattgaaagaaatattattaactttctggcctttgggtcttctgaaaaggctgaataaatgcagtggcctggaatcagccaaattgtggagaatgaagacaagcctctatcaaggcgtgggaagaagtgctagaggagaaacagccttccttgagccaaacagggtgatagcagaggtggccagtgaacttacaagagaaaggcaaatctgggggacaagaattgaagctgcaaatctccaaccacccctcccaagtacagattcctccactgccagccttaggcggttagggtgtgatcttacgaaaagaattggcaggccttctgaggcccacagaggggtcgtgtttagcaaatagagaatcagctactcaaagagcccccgggacactcatgcacacagacggaaaatcctaagtgtgatgttccccccagcaaccacgctgagacctcaggctaaagcatgttgagttctcctcactctggcacctgttttgtttttgt

SEQ ID NO: 3411 - DNA, 2001 bp, Homo sapiens
tcattgtcttgtcattctagaggctagaagtgaaacatcaaggtgtcggcagggttggttccctctgagggctgtgaggaagaatctgttccaagcctctctcctaacttctggtagccccaggcactcactggctttgtagatagccgtcttcctagatcttattgcatcatctttccactctgtatctgtctctgtgtccaaatttctcctttttataaggacactagtcaaattggattagggcccattctaactatttcattttaacttgatcatctctgcaaagaccctgtctccaaataaagtgacattcttaggtactgagggtgaggactgtaacgtatcctgtacaaatggatacggtgcaaccccaaacagtgaggcagccttgtagagtaggttcttccttctcgctgctggccccagatgggtctggtcttccttccatttagcccatgtttcccttctgttcagcaggtaaaagcaaactatagtgagttagctataagaagaaaaccagtgattgcatgaacttgttcttcctttcatctggtttccctttatctcatgccagtgggtggcgttttgccctgcatgcaccaggaaacacaaaaacaaaacaggtgccagagtgaggagaactcaacatgctttagcctgaggtctcagcgtggttgctggggggaacatcacacttaggattttccgtctgtgtgcatgagtgtcgcgggggctctttgagtagctgattctctatttgctaaacacgacccctctgtgggcctcagaaggcctgccaattcttttcgtaagatcacaccctaaccgcctaaggctggcagtggaggaatctgtacttgggaggggtggttggagatttgcagcttcaattcttgtcccccagatttgcctttctcttgtaagttcactggccacctctgctatcaccctgtttggctcaaggaaggctgtttctcctctagcacttcttcccacgccttgatagaggcttgtcttcattctccacaatttggctgattccaggccactgcatttattcagccttttcagaagacccaaaggccagaaagttaataatatttctttcaatggagcctctagatatggttgtctgagagctcaggccctttgccatgcatcttccaccctgtacctcttctgctgccaagtgactacatctttgaatccaagtatatccacagagtccaggccaggctcccttgccagtcagtccaaaacctacctttccaactcaacagcctcctctgctcatgatgactaatggtggagatgtttactcccttcagggaaggtctcaccccagtgccatgacttgggaagacccacatcagaacataatccaatctctatgccaaaaaaaaaaaaaaaaaaaatccacacagcaggaatctaattgttgtcttacagaagccctcttgatcactgctttaccagtctgattgtcctccccaacaaaagatacctgaccttgattaatagggagaaaggaaatccttttgaagaggagccagtgaaacaattttgtccttctattaagtggcaaacatttgtatttagaggctgttagatctgaaaggacggtagagatcatttagtgaaatttagatctctcattttgcagatgcccagaaagggaaagtaattttcataatgttggctagtggcaaagatgggactagaatccagctcttatgattcctagttcagtgctctttaaaataccgatgcatgccaaatggcagagtatagagactgtgacatgataatccttaattcaaacagagaccaggtcaccacaacatggagaaacacttctcgacaatcaggaaatccaaaatgacaataaagatctcccagatgaacggctctaccttgcaaatgtggacagcagagagaaaatattgcagaaattccctgctgctggtcacctctgcctcctggatgccacttacattg

SEQ ID NO: 3412 - DNA, 567 bp, Homo sapiens
agtcatcatgagcagaggaggctgttgagttggaaaggtaggttttggactgactggcaagggagcctggcctggactctgtggatatacttggattcaaagatgtagtcacttggcagcagaagaggtacagggtggaagatgcatggcaaagggcctgagctctcagacaaccatatctagaggctccattgaaagaaatattattaactttctggcctttgggtcttctgaaaaggctgaataaatgcagtggcctggaatcagccaaattgtggagaatgaagacaagcctctatcaaggcgtgggaagaagtgctagaggagaaacagccttccttgagccaaacagggtgatagcagaggtggccagtgaacttacaagagaaaggcaaatctgggggacaagaattgaagctgcaaatctccaaccacccctcccaagtacagattcctccactgccagccttaggcggttagggtgtgatcttatgaaaagaattggcaggccttctgaggcccacagaggggtcgtgtttagcaaatagagaatcagctactcaaaga

SEQ ID NO: 3413 - DNA, 506 bp, Homo sapiens
agcagcagggaatttctgcaatattttctctctgctgtccacatttgcaaggtagagccgttcatctgggagatctttattgtcattttggatttcctgattgtcgagaagtgtttctccatgttgtggtgacctggtctctgtttgaattaaggattatcatgtcacagtctctatactctgccatttggcatgcatcgatattttaaagagcactgaactaggaatcataagagctggattctagtcccatctttgccactagccaacattatgaaaattactttccctttctgggcatctgcaaaatgagagatctaaatttcactaaatgatctctaccgtcctttcagatctaacagcctctaaatacaaatgtttgccacttaatagaaggacaaaattgtttcactggctcctcttcaaaaggatttcctttctccctattaatcaaggtcaggtatcttttgttggggaggacaatcagactggtaaagcagtgatca

SEQ ID NO: 3414 - DNA, 997 bp, Homo sapiens
tgaagccatcggaaacccacacagcccctggggagaaagagaggtcatctgtggaaactcccttctgctgtgttccaaagctaacaagcaaaaattgatgcctaactgctgggcactgggcggggcagtgggatcagctgatgagctgacacccgcccccccacccacctggggctaacagatgggcagggagggcagaggtcatgttatctcaaatattcacatgtgggctaactgctatgaaggacaaaggtagagaaggagcatacccaggcaggaggggccttaccttgatctaaagtataatgggaggccttcttggaagaagtagcattatagctgggatctaaagattgggtatttctcagcctcagcactattgacattttggactagatgattttttgttacatgaggatgtcttgagccttgcaggatgcttagcagctcccctagcctcttctcactacatgccacttgtgacaaccaaaaaatgtctctggaaatggccaagtattccctgggtggtggggtggtggtaaaatcacccatgtttgggaatcactgatctgggtgaaactgtgacttttcaaggcagagccaagaaagagagggagcgagaggggaatggcctatttcagaaagtttgggaagccatgcatgccaggttggagcagagaaccagagggaagggtaaaaaaggtgaagctggaaaagaaagaaaccatgacacagagacccttctggtccacgtagaagatctgggacttcattgtgaggcaagagtggatttggacgatgaagtgatggtgactcaggtgaccagagtggaggcggataagcaggaaaaacagatcaatgtaagtggcatccaggaggcagaggtgaccagcagcagggaatttctgcaatattttctctctgctgtccacatttgcaaggtagagccgttcatctgggagatctttattgtcattttggatttcctgattgtcga

SEQ ID NO: 3415 - DNA, 20 bp, Homo sapiens
ttcctagactgccagggtca

SEQ ID NO: 3416 - DNA, 20 bp, Homo sapiens
gagcctgtgctggtgcttat

SEQ ID NO: 3417 - DNA, 260 bp, Homo sapiens
ttcctagactgccagggtcagcaaacagaagtgtctgttcaaagagggagggctggacgggaagagggctgctaggcccggtcagagaggacttcaggcagggagcatggaagctgtggacaggacagcttttagctctgggagcaggtgctggagccaagtcacacacaggtagcagtcagtgaggttcacatccaggaacctttttacagaaacccctctctctctctgtacagctgtataagcaccagcacaggctc

SEQ ID NO: 3418 - DNA, 581 bp, Homo sapiens
attgattgctgtggttcctttaaccctttgtgggaagggggaggcttccccatttccaggcctctttgcttcccctgcccctgtcaccaccattttatgcattcaaaaactgttattttattttatttttatttttatttgttaaatggtccttttcctagactgccagggtcagcaaacagaagtgtctgttcaaagagggagggctggacgggaagagggctgctaggcccggtcagagaggacttcaggcagggagcatggaagctgtggacaggacagcttttagctctgggagcaggtgctggagccaagtcacacacaggtagcagtcagtgaggttcacatccaggaacctttttacagaaacccctctctctctctgtacagctgtataagcaccagcacaggctccgacaacatgcaggtgaggaaggggacagaagggcctaagatcccaccatggagagagagggaggagaggggaggggggcttgtagcatcagcttatcagaaggaccccctggtgcaccagaagattgtagtcctgggtgaacaagagctgccctcgggggttagca

SEQ ID NO: 3419 - DNA, 401 bp, Homo sapiens
ccctgagccacagggagccacagggctgggactagagtgatgacacgcctggaggatgactaaatggccttgaagaatgattgaaatttcgtgccctaggcacctccctctaatcccaaccctgctgagccacctcgcctccatttaaccactcaaatatctagtaggcattgaccaacggcaaagtatgttgcatacttcggagggagtacaaaaaaagagacaggaaaaaggcacctgtctgcttcttcaaagcaaataaaaacagagacttaggaggcaaaactggtgcttctgttcacaacccggctgggtggctgggggagaatgctgatgctctgttccttctttgtgcccagacttttccacactgacagaagacacctcaggatagagacaag

SEQ ID NO: 3420 - DNA, 20 bp, Homo sapiens
catgcatttgcctagggttt

SEQ ID NO: 3421 - DNA, 19 bp, Homo sapiens
gtgctgggcttagcatcaa

SEQ ID NO: 3422 - DNA, 268 bp, Homo sapiens
catgcatttgcctagggtttgagttccagggagcacaggcccctcttctcttcaaatagagtatagaattcctcatctttttcaactcagaatccagctctcttcacttattcaacaaatatatatatattgaattcatactatgtgccaagatttgtgctaagcaccaagggaatcaatgaaaagacactgccgctacccatgaggcgctcacatctggttgatgacacagaatacaaacaggcaaatttgatgctaagcccagcac

SEQ ID NO: 3423 - DNA, 18 bp, Homo sapiens
caggcccctcttctcttc

SEQ ID NO: 3424 - DNA, 20 bp, Homo sapiens
agcatgcttcctgaaaggtg

SEQ ID NO: 3425 - DNA, 250 bp, Homo sapiens
caggcccctcttctcttcaaatagagtatagaattcctcatctttttcaactcagaatccagctctcttcacttattcaacaaatatatatatattgaattcatactatgtgccaagatttgtgctaagcaccaagggaatcaatgaaaagacactgccgctacccatgaggcgctcacatctggttgatgacacagaatacaaacaggcaaatttgatgctaagcccagcacctttcaggaagcatgct

SEQ ID NO: 3426 - DNA, 2001 bp, Homo sapiens
tgagtgagcctggcctgttggatgtctgcagacacagcctttgctaattccttgtaaatgtgatagttgccctcacctggtgttccctaaggtttatttctctcctcacagacaccaacgtgattcggtatatccagctgacggagatgaaactcagccgatgctcccagagagaaaaagaagccatgtaaccaggaagcagctccagagctgcgcccacgcctgaccggggacttccaggcatcccctggcagagagccccgtcctggattctgtccctttctccccacttcttctggctcctcatttttcctcctgttgcaccccagctctttgtctcctcccagtacgaaaaggagagatgcaaatttggaatctggtaggtcgcccagacaatggagacatcctctcctctagcaggtcagcgactgagaggggcctgacttctgctgggacagctggagaggagtctcatgggctgggatgctgttgtggctttgactttggccagtgcttctgacagaggcggagcctggcaagtgtaccatcccacaggcagcaggcacacagcccatgggctggatccttccacactttcctgacagaccagaaccagagcatctcgaggcaactgttagaaatccagggacgagacaaacagagaagcgctggtgaagccaacatagagactgtcaatgtgtacactggagttcccacccccaccccccacccgtcacttagcccctgcctccttcccccactcgttgtcttggcttgtgctttctcctctccccatcggggatccgagactctgccaggattcacatgccactgaagcccactcagtgccctctggtgaccacacataccattcccccggactcccacccagcaggcagctgtgaccgcagaagggcaggatgaagtgggccaaggtttgggacaggttgactgtgtaggtgacagggagggaaagatgatggccaggggaaagagcatcatataggctaggggattgaactgtggactgattcagtgtaaataaaaacaaattaacaggtagtagttcctgtcagttctgttggaagcagcccactccctcacttttactccttcctccaaccctcaatcagagctacttacagccaggcaggatggggctttccccaaagcaattggccgtttgtccagtggcagacaatggtggctacagcctttgtgcttttaagagtgggctgggattgtggagactgcccaggggcttggctttgtcagaacttgtacaatcttcttttgatgaaattatctgaactcaacatctagcacatagaatgtgttcaacaaatgcttgttgaatgaataaattatgactgcagactggctctcctgccttaaactaatttcatcccagcctagtctcctgatgtctgtgctcgttatgctatgccatgttgcttcagtcaaacaagaaacacttactgagggcatattgtttgcccatcattgtgcaatatgctgtgggacatgggatgtcgtctcagtcttcaaggaaatggaagggttaagaaatgcatatgagattattaccaatgacaccgttaatttatatgatgctttaaaattatcagagcactttcatgtatttttcgtgtgactagtgaaaaagacaatgttgtacaaaattaaaatatatacagatgcaataatgtgaatagttaggatttattaaatgcattatcttcagatctttacatgtataatctcatttctttcatgcagttactctgggatactgttcccatttgatgggtaagaatattgaaaaccagaaaaattaattatcccaaggttgcatggcctttagtggcatagctaggatttgaaccaggcctgcctgactccagagctctggctagtatctatgctatacttagttgcctctctgtaagtataatattgggcaattataaccatttgagaacaggacaatatgtattaacc

SEQ ID NO: 3427 - DNA, 2001 bp, Homo sapiens
cagcctttgctaattccttgtaaatgtgatagttgccctcacctggtgttccctaaggtttatttctctcctcacagacaccaacgtgattcggtatatccagctgacggagatgaaactcagccgatgctcccagagagaaaaagaagccatgtaaccaggaagcagctccagagctgcgcccacgcctgaccggggacttccaggcatcccctggcagagagccccgtcctggattctgtccctttctccccacttcttctggctcctcatttttcctcctgttgcaccccagctctttgtctcctcccagtacgaaaaggagagatgcaaatttggaatctggtaggtcgcccagacaatggagacatcctctcctctagcaggtcagcgactgagaggggcctgacttctgctgggacagctggagaggagtctcatgggctgggatgctgttgtggctttgactttggccagtgcttctgacagaggcggagcctggcaagtgtaccatcccacaggcagcaggcacacagcccatgggctggatccttccacactttcctgacagaccagaaccagagcatctcgaggcaactgttagaaatccagggacgagacaaacagagaagcgctggtgaagccaacatagagactgtcaatgtgtacactggagttcccacccccaccccccacccgtcacttagcccctgcctccttcccccactcgttgtcttggcttgtgctttctcctctccccatcggggatccgagactctgccaggattcacatgccactgaagcccactcagtgccctctggtgaccacacataccattcccccggactcccacccagcaggcagctgtgaccgcagaagggcaggatgaagtgggccaaggtttgggacaggttgactgtgtaggtgacagggagggaaagatgatggccaggggaaagagcatcgtataggctaggggattgaactgtggactgattcagtgtaaataaaaacaaattaacaggtagtagttcctgtcagttctgttggaagcagcccactccctcacttttactccttcctccaaccctcaatcagagctacttacagccaggcaggatggggctttccccaaagcaattggccgtttgtccagtggcagacaatggtggctacagcctttgtgcttttaagagtgggctgggattgtggagactgcccaggggcttggctttgtcagaacttgtacaatcttcttttgatgaaattatctgaactcaacatctagcacatagaatgtgttcaacaaatgcttgttgaatgaataaattatgactgcagactggctctcctgccttaaactaatttcatcccagcctagtctcctgatgtctgtgctcgttatgctatgccatgttgcttcagtcaaacaagaaacacttactgagggcatattgtttgcccatcattgtgcaatatgctgtgggacatgggatgtcgtctcagtcttcaaggaaatggaagggttaagaaatgcatatgagattattaccaatgacaccgttaatttatatgatgctttaaaattatcagagcactttcatgtatttttcgtgtgactagtgaaaaagacaatgttgtacaaaattaaaatatatacagatgcaataatgtgaatagttaggatttattaaatgcattatcttcagatctttacatgtataatctcatttctttcatgcagttactctgggatactgttcccatttgatgggtaagaatattgaaaaccagaaaaattaattatcccaaggttgcatggcctttagtggcatagctaggatttgaaccaggcctgcctgactccagagctctggctagtatctatgctatacttagttgcctctctgtaagtataatattgggcaattataaccatttgagaacaggacaatatgtattaacctgaaaagtgttcatgatgtcagtgatagtacatg

SEQ ID NO: 3428 - DNA, 801 bp, Homo sapiens
acgagacaaacagagaagcgctggtgaagccaacatagagactgtcaatgtgtacactggagttcccacccccaccccccacccgtcacttagcccctgcctccttcccccactcgttgtcttggcttgtgctttctcctctccccatcggggatccgagactctgccaggattcacatgccactgaagcccactcagtgccctctggtgaccacacataccattcccccggactcccacccagcaggcagctgtgaccgcagaagggcaggatgaagtgggccaaggtttgggacaggttgactgtgtaggtgacagggagggaaagatgatggccaggggaaagagcatcgtataggctaggggattgaactgtggactgattcagtgtaaataaaaacaaattaacaggtagtagttcctgtcagttctgttggaagcagcccactccctcacttttactccttcctccaaccctcaatcagagctacttacagccaggcaggatggggctttccccaaagcaattggccgtttgtccagtggcagacaatggtggctacagcctttgtgcttttaagagtgggctgggattgtggagactgcccaggggcttggctttgtcagaacttgtacaatcttcttttgatgaaattatctgaactcaacatctagcacatagaatgtgttcaacaaatgcttgttgaatgaataaattatgactgcagactggctctcctgccttaaactaatttcatcccagcctagtctcctgatgtctgtgctcgttatgctatgcca

SEQ ID NO: 3429 - DNA, 801 bp, Homo sapiens
ggagttcccacccccaccccccacccgtcacttagcccctgcctccttcccccactcgttgtcttggcttgtgctttctcctctccccatcggggatccgagactctgccaggattcacatgccactgaagcccactcagtgccctctggtgaccacacataccattcccccggactcccacccagcaggcagctgtgaccgcagaagggcaggatgaagtgggccaaggtttgggacaggttgactgtgtaggtgacagggagggaaagatgatggccaggggaaagagcatcgtataggctaggggattgaactgtggactgattcagtgtaaataaaaacaaattaacaggtagtagttcctgtcagttctgttggaagcagcccactccctcacttgtactccttcctccaaccctcaatcagagctacttacagccaggcaggatggggctttccccaaagcaattggccgtttgtccagtggcagacaatggtggctacagcctttgtgcttttaagagtgggctgggattgtggagactgcccaggggcttggctttgtcagaacttgtacaatcttcttttgatgaaattatctgaactcaacatctagcacatagaatgtgttcaacaaatgcttgttgaatgaataaattatgactgcagactggctctcctgccttaaactaatttcatcccagcctagtctcctgatgtctgtgctcgttatgctatgccatgttgcttcagtcaaacaagaaacacttactgagggcatattgtttgcccatcattgt

SEQ ID NO: 3430 - DNA, 2001 bp, Homo sapiens
cctgaccggggacttccaggcatcccctggcagagagccccgtcctggattctgtccctttctccccacttcttctggctcctcatttttcctcctgttgcaccccagctctttgtctcctcccagtacgaaaaggagagatgcaaatttggaatctggtaggtcgcccagacaatggagacatcctctcctctagcaggtcagcgactgagaggggcctgacttctgctgggacagctggagaggagtctcatgggctgggatgctgttgtggctttgactttggccagtgcttctgacagaggcggagcctggcaagtgtaccatcccacaggcagcaggcacacagcccatgggctggatccttccacactttcctgacagaccagaaccagagcatctcgaggcaactgttagaaatccagggacgagacaaacagagaagcgctggtgaagccaacatagagactgtcaatgtgtacactggagttcccacccccaccccccacccgtcacttagcccctgcctccttcccccactcgttgtcttggcttgtgctttctcctctccccatcggggatccgagactctgccaggattcacatgccactgaagcccactcagtgccctctggtgaccacacataccattcccccggactcccacccagcaggcagctgtgaccgcagaagggcaggatgaagtgggccaaggtttgggacaggttgactgtgtaggtgacagggagggaaagatgatggccaggggaaagagcatcgtataggctaggggattgaactgtggactgattcagtgtaaataaaaacaaattaacaggtagtagttcctgtcagttctgttggaagcagcccactccctcacttttactccttcctccaaccctcaatcagagctacttacagccaggcaggatggggctttccccaaagcaattggccgtttgtccagtggcagacaatggtggctacagcctttgtgcttttaagagtgggctgggattgtggagactgcccaggggcttggctttgtcagaacttgtacaatcttcttttgatgaaattatctgaactcaacatctagcacatagaatgtgttcaacaaatgcttgttgaatgaataaattatgactgcagactggctctcctgccttaaactaatttcatcccagcctagtctcctgatgtctgtgctcgttatgctatgccatgttgcttcagtcaaacaagaaacacttactgagggcatattgtttgcccatcattgtgcaatatgctgtgggacatgggatgtcgtctcagtcttcaaggaaatggaagggttaagaaatgcatatgagattattaccaatgacaccgttaatttatatgatgctttaaaattatcagagcactttcatgtatttttcgtgtgactagtgaaaaagacaatgttgtacaaaattaaaatatatacagatgcaataatgtgaatagttaggatttattaaatgcattatcttcagatctttacatgtataatctcatttctttcatgcagttactctgggatactgttcccatttgatgggtaagaatattgaaaaccagaaaaattaattatcccaaggttgcatggcctttagtggcatagctaggatttgaaccaggcctgcctgactccagagctctggctagtatctatgctatacttagttgcctctctgtaagtataatattgggcaattataaccatttgagaacaggacaatatgtattaacctgaaaagtgttcatgatgtcagtgatagtacatggcctccttatgtatttactcaagggccccaaaagaccagaggccagaatccctagtagtcagagcagtgacaggtcagaaaaaggcagctgaggtccaatagttatgtctgtgtattgctcattctacttactgatggagccagcatgtatctcaacaactcacctagcattcatcacccatcccca

SEQ ID NO: 3431 - DNA, 801 bp, Homo sapiens
acaatggtggctacagcctttgtgcttttaagagtgggctgggattgtggagactgcccaggggcttggctttgtcagaacttgtacaatcttcttttgatgaaattatctgaactcaacatctagcacatagaatgtgttcaacaaatgcttgttgaatgaataaattatgactgcagactggctctcctgccttaaactaatttcatcccagcctagtctcctgatgtctgtgctcgttatgctatgccatgttgcttcagtcaaacaagaaacacttactgagggcatattgtttgcccatcattgtgcaatatgctgtgggacatgggatgtcgtctcagtcttcaaggaaatggaagggttaagaaatgcatatgagattattaccaatgacaccgttaatttatatgatgctttaaaattatcagagcactttcatgtatttttcgtgtgactagtgaaaaagacaatgttgtacaaaattaaaatatatacagatgcaataatgtgaatagttaggatttattaaatgcattatcttcagatctttacatgtataatctcatttctttcatgcagttactctgggatactgttcccatttgatgggtaagaatattgaaaaccagaaaaattaattatcccaaggttgcatggcctttagtggcatagctaggatttgaaccaggcctgcctgactccagagctctggctagtatctatgctatacttagttgcctctctgtaagtataatattgggcaattataaccatttgagaacaggacaatatgtatta

SEQ ID NO: 3432 - DNA, 801 bp, Homo sapiens
agaacgaaatgaagacagcctctcagaacctcatagaacaagcgtccaggtcatctgcttgtttggtgacttagatatacaggcttactggaactccattcactgtgacctgaagttaaataatcccaaagagaaaaagctacctggggtattggttgatgtttggggtgatagggctgaattttctgtgcatttgtccaacaaaggctttagagcacaaaaccaggttcattctccctaccaaatcttcagcttccttctcctcatccctccccaaaacaagaactgtgatttaattccgtacgttgcggatgtcactgctgacctatgtagctggagtactaatcaggcatctgacctgcactgtcatcccctgcctggacttttgcgatggactcttcgggggaaaaactaacgctttttaattattgtgaaagcatcatgtgtgtattgtagaagttttaggaaaaaaaggacaaaatccaatccataagcttaccacccaagacaaacgtgtattcttttgaatataccttttagttctttttggtgtaaatgtacacacgcacacacagttgtggatttttttaaacaaaaactggatacactgaatatactctttaataacttttcaagtgtgtatttatattttagaatatgtaatcctacacagatacaaaattcaaaaagtacaaactgctctgtagtcagaagtaaatcttctccctaccccgtctgccagcatctagtttccctctaatttattttgcatcctagtggagatgcttacacattgtcaaa

SEQ ID NO: 3433 - DNA, 20 bp, Homo sapiens
tgaaagggagcctacgtctg

SEQ ID NO: 3434 - DNA, 22 bp, Homo sapiens
tgaatgcgggagtaaataaatg

SEQ ID NO: 3435 - DNA, 400 bp, Homo sapiens; identical to SEQ ID NO: 33

SEQ ID NO: 3436 - DNA, 2001 bp, Homo sapiens
tgagctttgtttttcagtctattagtgtcctttgtttttttgtgacgaggttgctcaggctggagtgcagtggcacaattatggctcattgcagcctcaaactcctgggctcaaaggattcccacacctcagcttcctaagtagctgggaccacaggcacatgccaccacacccagctaattattatattttttttttgtagagatgggagtctcactgtattgcccaggctgatctcaaactcctaggctcaaacaggcctcctgcttgggcctcccaaaattctgggattacaggcatgagccactgcacctggcctagtgtccctctttagatacagcacacagaactatactggccagcacagaaaacagggaaccatcatcatttccctacctctggattgcaaaatgccttgcctttttatccaatcattccacagttggaatgtagcatgcttgtggccccatctcttacttataccatgactttttaaagaataatgcaatataaaataataataaaacaatatttactccaaagaaatttcatgtattgtattactgagttataattatgtgccataaaatgcacagatctcaagcattagttaataagtgaatacactcctgcaacaatacaccaatcacaatataggacatcatcatcaccctagaaacttctctcatgtccctttctagtcaatctcctcttcaaactcctagaggcaaccactattctgatttctagccctatagattcattttacaaaaataaaaattgtttctgacattcatgtaagtggaaaaatacagtattgtaacttttttatcttaatgcaatacaatttcattcttattaaacataatcatattgctttccatatttcctcatagcttcttgtgaacattttgatcttggttctgccaaccatatctgctaatttccctaactttatgccacctacagacttaataattccttctgtcctttatccaacataagacaaaaccaatgatagagtccagggtacttaactagaaacctcccttcaattttcaagcttaggaaatgagaagcattgtgaaagcgccagccaaatgggggcacctggagacaacacatgtggatggagagggctgtgttctgttaggatgcagtgaagagggaggtgatgacaggacatcctggtgggatgtgtgctagggaaggggaacggctcagaagaaggtctgagagtcacttgcatagaaattaccaatgtggagggaggaaaagagctcccaaagggaagaaccgagggctgggtcagtcacctacaagagagggcctcaaaggtttccaaggtcatctgaggagtcttgagtgaaagctgttgtttggtctggttttatgttttgctttgctttgtttgttttgataagtcctaagtggagtctggcagcctataaggcagatgatatttctagatttagaagtaactgaaattgtgcaatcatggagagacatagtccattccctcactcccccaacctcggagcagtgaggcttcggggacaggcagagtacaggctgggggcaggggtcagggagggacgtttgaaacacatcgatcttcccttccttcaggggagaactctggtaaagtcaaggccaccttatcgaaatgttccttacatttttactttttgattatttttgattcagcattatagggcttctgcttctttgacacacacgtgggcttagaaatgcaggtaggcacctgacccacacctgaggaagtgtgaacctggatctgccatccctggctgtgggatttgagcttgtggcaggccttatactcacctataaatgggcaaaggtgagtcagaaatctgtcagagtgtcagaatcagccagccagcattttaaaaaatatatgtgatggggtctaggaaactattttatttagaagctagaactccagtactggttcataaactgatatttgggagttac

SEQ ID NO: 3437 - DNA, 2001 bp, Homo sapiens
cccatcccatcctggctgggaactcagtttttaaggtttctctagggttcccttggccaagaggggatctgttcatatggttgaggggcttaggactttttttttttagttttcagtcttaagggccatgatgaccagttcgggagcatcaaagggagcattggggcattcacgtcattagcttgaaggagcaactcccaagctggtttcaagatggctggcaggccctgtgttgtcacaaaagagggattccctttgtccaaagctaggagagctcaaattctctacagctccccccatcagacagatgccccaaaagagctcgtgaaaggagaatgacctggtggcaccaaaaatacagacaggctcccttcccaagaactctcccagtgcctctgtcgtgcatacagccctggggctaatcacgaagtttcgtttgttttctgaaaaggcaactcacaagaaacatgagagtaaaggcaactaggaacaaggaaacgaaactgctggtgtcgccttcccgcgctcctcattctgttgactcactccttggcctccgagatgagcatctccagctcagaagtgaggcctgttgacggaagcgtgatgagctttcctagcccaggcctgctagtctagctggaaggcatcctctctgtcatcatgccattttagaaaaatgcaattcacctatctctcttgatgtataggaggctccatttgaaaaaatgaggactctgatggagccaaagtccacagatgtaaatatctccgataacaaaacttttttttttttttgagatggaatctccctctattgcccaggctggagtgcaatggcacgatcttggctccctgcaacctactcttcccaggttcaagtgattctcctgcctcagcctcccaagtagctgggattacaggcatgtaccatcacgcctggctaatttttgtatttttagtaaagatgaggttttgccatgttggccaggctggtcttcaactcctgacttcaggtgatctgcctgcctcggcctcccaaagtgctgggattacaggcatgagccactgcgcccggccatagtttttgtatttttagtagagacggggtttcaccatgttggccaggctggtctcgaactcctgacctcaggtgatctgcccacctcggcctcccaaagtgctgggatttcaggcgtgagccaccacacctggccaacaagacatttttcttgcccaaatttcacagacctttagagcttgaaagaagctcatctaattggaccccctttaaagagactaaggcccatggtgacagggctgggacacaaaccgattttttggagactccaagttcagtacttcttaatggttcttggttcttccatgcccttttaggttggcaacttgttcctgggttggcaactcaatcctgggacccctaaataggcaccccaaaactaaaaagggaaagaagatgtgactttcggagaccaccgtcaggtcactaaattgaaagacagctgcagccaccatcaaaatccctcatgcttcttgagagcttcagagcttcctgactccagtagccatggctgtgaccccagggagtcctctaaacctcaggtctccatggaaatgggggtgacctctgagagtgtttgacacacatgttttggaaggaccgggtggcaggaagaaggattgtgtaccaacttacaccttgggggcctggaattggaattgatgtcactgctagcaggccaaagcagtagttgagcaaattctgtcagttctaacttcaaaatatatctggaatctgattacttctaccactcctactaccaccccactccaagacataactctagctcccctagcattaccctctaactggattcactacttctgttcttgacccctgcactctattccagagcgatcctgttaaacctgattcagatcatgtcactcctctgcttaaaatcctccaatggcttcccc

SEQ ID NO: 3438 - DNA, 19 bp, Homo sapiens
gtaccatcacgcctggcta

SEQ ID NO: 3439 - DNA, 22 bp, Homo sapiens
gtggtctccgaaagtcacatct

SEQ ID NO: 3440 - DNA, 1325 bp, Homo sapiens
gattccagatatattttgaagttagaactgacagaatttgctcaactactgctttggcctgctagcagtgacatcaattccaattccaggcccccaaggtgtaagttggtacacaatccttcttcctgccacccggtccttccaaaacatgtgtgtcaaacactctcagaggtcacccccatttccatggagacctgaggtttagaggactccctggggtcacagccatggctactggagtcaggaagctctgaagctctcaagaagcatgagggattttgatggtggctgcagctgtctttcaatttagtgacctgacggtggtctccgaaagtcacatcttctttccctttttagttttggggtgcctatttaggggtcccaggattgagttgccaacccaggaacaagttgccaacctaaaagggcatggaagaaccaagaaccattaagaagtactgaacttggagtctccaaaaaatcggtttgtgtcccagccctgtcaccatgggccttagtctctttaaagggggtccaattagatgagcttctttcaagctctaaaggtctgtgaaatttgggcaagaaaaatgtcttgttggccaggtgtggtggctcacgcctgaaatcccagcactttgggaggccgaggtgggcagatcacctgaggtcaggagttcgagaccagcctggccaacatggtgaaacccygtctctactaaaaatacaaaaactatggccgggcgcagtggctcatgcctgtaatcccagcactttgggaggccgaggcaggcagatcacctgaagtcaggagttcaagaccagcctggccaacatggcaaaacctcatctttactaaaaatacaaaaattagccaggcgtgatggtacatgcctgtaatcccagctacttgggaggctgaggcaggagaatcacttgaacctgggaagagtaggttgcagggagccaagatcgtgccattgcactccagcctgggcaatagagggagattccatctcaaaaaaaaaaaaaagttttgttatcggagatatttacatctgtggactttggctccatcagagtcctcattttttcaaatggagcctcctatacatcaagagagataggtgaattgcatttttctaaaatggcatgatgacagagaggatgccttccagctagactagcaggcctgggctaggaaagctcatcacgcttccgtcaacaggcctcacttctgagctggagatgctcatctcggaggccaaggagtgagtcaacagaatgaggagcgcgggaaggcgacaccagcagtttcgtttcct

SEQ ID NO: 3441 - DNA, 2001 bp, Homo sapiens
agggccatgatgaccagttcgggagcatcaaagggagcattggggcattcacgtcattagcttgaaggagcaactcccaagctggtttcaagatggctggcaggccctgtgttgtcacaaaagagggattccctttgtccaaagctaggagagctcaaattctctacagctccccccatcagacagatgccccaaaagagctcgtgaaaggagaatgacctggtggcaccaaaaatacagacaggctcccttcccaagaactctcccagtgcctctgtcgtgcatacagccctggggctaatcacgaagtttcgtttgttttctgaaaaggcaactcacaagaaacatgagagtaaaggcaactaggaacaaggaaacgaaactgctggtgtcgccttcccgcgctcctcattctgttgactcactccttggcctccgagatgagcatctccagctcagaagtgaggcctgttgacggaagcgtgatgagctttcctagcccaggcctgctagtctagctggaaggcatcctctctgtcatcatgccattttagaaaaatgcaattcacctatctctcttgatgtataggaggctccatttgaaaaaatgaggactctgatggagccaaagtccacagatgtaaatatctccgataacaaaacttttttttttttttgagatggaatctccctctattgcccaggctggagtgcaatggcacgatcttggctccctgcaacctactcttcccaggttcaagtgattctcctgcctcagcctcccaagtagctgggattacaggcatgtaccatcacgcctggctaatttttgtatttttagtaaagatgaggttttgccatgttggccaggctggtcttgaactcctgacttcaggtgatctgcctgcctcggcctcccaaagtgctgggattacaggcatgagccactgcgcccggccatagtttttgtatttttagtagagacggggtttcaccatgtaggccaggctggtctcgaactcctgacctcaggtgatctgcccacctcggcctcccaaagtgctgggatttcaggcgtgagccaccacacctggccaacaagacatttttcttgcccaaatttcacagacctttagagcttgaaagaagctcatctaattggaccccctttaaagagactaaggcccatggtgacagggctgggacacaaaccgattttttggagactccaagttcagtacttcttaatggttcttggttcttccatgcccttttaggttggcaacttgttcctgggttggcaactcaatcctgggacccctaaataggcaccccaaaactaaaaagggaaagaagatgtgactttcggagaccaccgtcaggtcactaaattgaaagacagctgcagccaccatcaaaatccctcatgcttcttgagagcttcagagcttcctgactccagtagccatggctgtgaccccagggagtcctctaaacctcaggtctccatggaaatgggggtgacctctgagagtgtttgacacacatgttttggaaggaccgggtggcaggaagaaggattgtgtaccaacttacaccttgggggcctggaattggaattgatgtcactgctagcaggccaaagcagtagttgagcaaattctgtcagttctaacttcaaaatatatctggaatctgattacttctaccactcctactaccaccccactccaagacataactctagctcccctagcattaccctctaactggattcactacttctgttcttgacccctgcactctattccagagcgatcctgttaaacctgattcagatcatgtcactcctctgcttaaaatcctccaatggcttccccctcactcatggtaaaagctaaagtactttactatgaactacagggtccaacatcattgggtcctataatactctgacctgctctctccatctgcttcagcgataactggcctctctgtgat

SEQ ID NO: 3442 - DNA, 23 bp, Homo sapiens
cagatagtctttgcccactgttc

SEQ ID NO: 3443 - DNA, 20 bp, Homo sapiens
tgtttctccacagcacctca

SEQ ID NO: 3444 - DNA, 173 bp, Homo sapiens
cagatagtctttgcccactgttcaagagcttttgtctaatcttttcattcattcatttattcaatcactcatttattcatttgctagggctagaggcttagcacagtccctggcacatggaaaatgctaaacaaatgcaagctcttagtgttatgaggtgctgtggagaaaca

SEQ ID NO: 3445 - DNA, 22 bp, Homo sapiens
ggaagcctgagtaatttgccta

SEQ ID NO: 3446 - DNA, 20 bp, Homo sapiens
ttggctggattcattgagaa

SEQ ID NO: 3447 - DNA, 225 bp, Homo sapiens
ggaagcctgagtaatttgcctaaagtcctacaaccaaataatggaactcgggtccaaacccaaatctgattccaaattccatttgctttattactgtatgctagaaaggaagaaaacatgcatacatacatacataattatttttacaagacagaaaagcaaatgagactgtagagcacagaatattttcatggcgcatagtagattctcaatgaatccagccaa

SEQ ID NO: 3448 - DNA, 22 bp, Homo sapiens
ggaagcctgagtaatttgccta

SEQ ID NO: 3449 - DNA, 20 bp, Homo sapiens
ttggctggattcattgagaa

SEQ ID NO: 3450 - DNA, 225 bp, Homo sapiens; identical to SEQ ID NO: 3447

SEQ ID NO: 3451 - DNA, 21 bp, Homo sapiens
tttcatggcgcatagtagatt

SEQ ID NO: 3452 - DNA, 24 bp, Homo sapiens
tctctctctgtcctgtgacatctt

SEQ ID NO: 3453 - DNA, 143 bp, Homo sapiens
tttcatggcgcatagtagattctcaatgaatccagccaaataatgatgatgttgatgatgtcagtaatgatgatgacaaaattctaaagtgccatactgaagttttaaaaaattgttttaagatgtcacaggacagagagaga

SEQ ID NO: 3454 - DNA, 2001 bp, Homo sapiens
ccattccctatctcaactgtgctcttcttctccacagtggctcccaaagtctcaagcccactgtgctgatttgagcatttggctcagccttttctggtcatcaccaacgttcacctggccatgctgatggcagcacgcatggatctggccattcccacagcctggtcaccccatggtggcccttgattgagcttgccatggcacggaagggggcctctcctactcaccgatctccttattgaggtacagcacattcatttgtattcatatggtagtaatacctaatttttataaaactcctcaagtgccaggcactgtccaaagtatttacatacattactcatttaatcctcacaatcacatgatatatactgttagccccaatttacagattgaggaaacttgcccatggagacttttgttaacatattcaaagttgcatgtaaggaacagggcccagatttcaacccaagctactaagttcccaagtgcatgtgtgttccaaaacatcatgccatgaggctgctgaagatacacatgactggtatccaaatccttcctaggaataggcagtgatgctatgggtggagaagcatggaggaggcagatcctggaaagagggtgagcaaagggcacagaaaggggacactgggagtcagaagccaaaggggaacttggacttccctccgttctccaaggcctggctctctttgaagatagtgtgggatgagagagagaacagaatactaaagaacagaatgagagcaggtgagcagtgggcccagaggagaggaatgcacacaggctgaagggagagaagagacaaaatggacatagcacgtctcacaagccaatgggaggagctgggaacccagcattagctggaaggtgctcaccttccctcttgatggttgactcagtgccgacacagactttagctgtcagcctgaaagcaatcagctcatcattgcagcctctttattgtctaaatttttctgaaagcatgagaagccactggcctttcaacagggctaccgaggacctggggaagagaagggcagggaagcagagacagaggccaaacacaagtgcttctgccagcagggttcagagcacatctggcaaccccagctcccagccctgaagcaggcaccaggctacaaggacagacatagaccagggacaaggaaaaggaagggccagccccaaagcccttgggatgccttgtcaacaggccagtgtcctttggaaaacactccaaaggaaacaacaaatgtgagacaaaggatttccttcctcttccctcatgtcggaaattccctgagtttctttcctggaccacttgtctgtctctataacaatcctacacactggtcaaagtttttaaggccaaaagttttaaaggaaatggaaagagaagtaagattgaaaagatgtgtcagagtctgttgctgtcactgtgggagctcactctttcttgtcacagtgaacaaagctgaggaaaccaagatttttccatgcatttgctggggttgggacccatggcctagaactaggggtcagcggaaaacagagcatgcccattagacaaaggggttagcgagaaggaagatagaagcagatgccaatggggcagggagctgtagggaaaagagggggaagagggagggatggggggaaaaggaggaagaagtggaggaggaggggatgaggaggagaaggaggaacaagaggaagaggggaaaggaggaagaggaggggggtgagaagaaagaggaaggaggaggaagaggaggaggaggaagaggaggaggaggaagaggaggaggaaggggaggaggaggaaggggaggaggaggaaggggaggaagaggggatgcacatggagaagagaaatcaccactgccttgtctgccttcacttctccctgcctctggcatcctctacctgctgtcagtcaagttcttgccactggcacttaacttgtcttccctttatgga

SEQ ID NO: 3455 - DNA, 2001 bp, Homo sapiens
atggcagcacgcatggatctggccattcccacagcctggtcaccccatggtggcccttgattgagcttgccatggcacggaagggggcctctcctactcaccgatctccttattgaggtacagcacattcatttgtattcatatggtagtaatacctaatttttataaaactcctcaagtgccaggcactgtccaaagtatttacatacattactcatttaatcctcacaatcacatgatatatactgttagccccaatttacagattgaggaaacttgcccatggagacttttgttaacatattcaaagttgcatgtaaggaacagggcccagatttcaacccaagctactaagttcccaagtgcatgtgtgttccaaaacatcatgccatgaggctgctgaagatacacatgactggtatccaaatccttcctaggaataggcagtgatgctatgggtggagaagcatggaggaggcagatcctggaaagagggtgagcaaagggcacagaaaggggacactgggagtcagaagccaaaggggaacttggacttccctccgttctccaaggcctggctctctttgaagatagtgtgggatgagagagagaacagaatactaaagaacagaatgagagcaggtgagcagtgggcccagaggagaggaatgcacacaggctgaagggagagaagagacaaaatggacatagcacgtctcacaagccaatgggaggagctgggaacccagcattagctggaaggtgctcaccttccctcttgatggttgactcagtgccgacacagactttagctgtcagcctgaaagcaatcagctcatcattgcagcctctttattgtctaaatttttctgaaagcatgagaagccactggcctttcaacagggctaccgaggacctggggaagagaagggcagggaagcagagacagaggccaaacacaagtgcttctgccagcagggttcagagcacatctggcaacaccagctcccagccctgaagcaggcaccaggctacaaggacagacatagaccagggacaaggaaaaggaagggccagccccaaagcccttgggatgccttgtcaacaggccagtgtcctttggaaaacactccaaaggaaacaacaaatgtgagacaaaggatttccttcctcttccctcatgtcggaaattccctgagtttctttcctggaccacttgtctgtctctataacaatcctacacactggtcaaagtttttaaggccaaaagttttaaaggaaatggaaagagaagtaagattgaaaagatgtgtcagagtctgttgctgtcactgtgggagctcactctttcttgtcacagtgaacaaagctgaggaaaccaagatttttccatgcatttgctggggttgggacccatggcctagaactaggggtcagcggaaaacagagcatgcccattagacaaaggggttagcgagaaggaagatagaagcagatgccaatggggcagggagctgtagggaaaagagggggaagagggagggatggggggaaaaggaggaagaagtggaggaggaggggatgaggaggagaaggaggaacaagaggaagaggggaaaggaggaagaggaggggggtgagaagaaagaggaaggaggaggaagaggaggaggaggaagaggaggaggaggaagaggaggaggaaggggaggaggaggaaggggaggaggaggaaggggaggaagaggggatgcacatggagaagagaaatcaccactgccttgtctgccttcacttctccctgcctctggcatcctctacctgctgtcagtcaagttcttgccactggcacttaacttgtcttccctttatggacctcagccatccacccctccaggtccttcctgcctctcacctggaccagtctgtggcttccaataatagtcttcttagcttcagtttctcccatctccagctcattcctctcaccactccaggttt

SEQ ID NO: 3456 - DNA, 19 bp, Homo sapiens
gcagggagctgtagggaaa

SEQ ID NO: 3457 - DNA, 20 bp, Homo sapiens
tctcttctccatgtgcatcc

SEQ ID NO: 3458 - DNA, 262 bp, Homo sapiens
gcagggagctgtagggaaaagagggggaagagggagggatggggggaaaaggaggaagaagtggaggaggaggggatgaggaggagaaggaggaacaagaggaagaggggaaaggaggaagaggaggggggtgagaagaaagaggaaggaggaggaagaggaggaggaggaagaggaggaggaggaagaggaggaggaaggggaggaggaggaaggggaggaggaggaaggggaggaagaggggatgcacatggagaagaga

SEQ ID NO: 3459 - DNA, 20 bp, Homo sapiens
gggatgaggaggagaaggag

SEQ ID NO: 3460 - DNA, 20 bp, Homo sapiens
gtgaaggcagacaaggcagt

SEQ ID NO: 3461 - DNA, 217 bp, Homo sapiens
gggatgaggaggagaaggaggaacaagaggaagaggggaaaggaggaagaggaggggggtgagaagaaagaggaaggaggaggaagaggaggaggaggaagaggaggaggaggaagaggaggaggaaggggaggaggaggaaggggaggaggaggaaggggaggaagaggggatgcacatggagaagagaaatcaccactgccttgtctgccttcac

SEQ ID NO: 3462 - DNA, 21 bp, Homo sapiens
agtcctccaatagtcccagca

SEQ ID NO: 3463 - DNA, 24 bp, Homo sapiens
gcaaaattcagacccatatttgta

SEQ ID NO: 3464 - DNA, 570 bp, Homo sapiens
tttgttacataggtaaacgtgtgccatggtggtttgctgcatctatcaacccatcacctaggtactaagccccgcatgcattagctattcatcctgatggtctccttcccccactgcccccaacaggccccagtgtgtgttgcagaaccagtactattgaccccaacaatgtatggccatggccttgtgtgtaaccatagcttgactagtgctaattctcttctccaaagcacatagcgcagcagacctgcactgtctgtctggcctcttcttttgggagcctgttccttctrctgatacctgacatcttggaagcatccgctggtctcaggaggcagtgtggtgtggcaatgagatggcaagtttattaactgggtgacctaggttctaacacctcctttgcccccagattactgtgtgatcttgggcaattgcttcccctccgtgggccgggttctgatggtataatgagcactgaggtccctcccagcttgaacagtgctgggactattggaggactccacaggggtgtgtggtttgtgactcatctcagaggatcctgccccccca

SEQ ID NO: 3465 - DNA, 2001 bp, Homo sapiens
ttagccgggggtggtggcgtgtacctgtagtcccaactactcaggaggctgaagtggggagatcaattgagcctgggaggtcgaggcttcagtgagctgtgattatgccactccagcccgggtgacagagtgagaccctgtctcaaacaaacaacaacaacaaaagaacttgaaattcaaatgagacagttttagggtcagtgaagaaggggatccttgggacgcttttggcagaaggcaggtctggggaatgggaaagaggctgttgggcagatgtcctttgctatagcagtccctgaggtttgcagggtgctgggctccccagagagaactgtatttcctgcaatgactctgtgccatgttgggtgggaatgattctcatgccttccttttctttctcttgggctttcccctagagaagggattagaaaatcactagatggttacttcctccaacctcccactcaaatccagcaacctgaaattcaagctcaagaggtgtgggagggaaagcccagcaatcatcaaagcaggagactctacattcatgagcagatctgggccaaggccacagctgggggggcaggatcctctgagatgagtcacaaaccacacacccctgtggagtcctccaatagtcccagcactgttcaagctgggagggacctcagtgctcattataccatcagaacccggcccacggaggggaagcaattgcccaagatcacacagtaatctgggggcaaaggaggtgttagaacctaggtcacccagttaataaacttgccatctcattgccacaccacactgcctcctgagaccagcggatgcttccaagatgtcaggtatcagcagaaggaacaggctcccaaaagaagaggccagacagacagtgcaggtctgctgcgctatgtgctttggagaagagaattagcactagtcaagctatggttacacacaaggccatggccatacattgttggggtcaatagtactggttctgcaacacacactggggcctgttgggggcagtgggggaaggagaccatcaggatgaatagctaatgcatgcggggcttagtacctaggtgatgggttgatagatgcagcaaaccaccatggcacacgtttacctatgtaacaaacctgcacatcttgcacatgtaccccaaaacttaaaataataaagaaaaaaaaatagtactggttctgagctcatacaaatatgggtctgaattttgcgtgaccttgaataggtgacccaacttttctaagcctcagtttcctcacctgtaaaatgaaggttaaaagaatactcgcctcataggatttttgtggggactaaataaggtgatttatgtaaagcacttagcacatttaaaagctggcactgaataagcactcaatatatgttggccattatttttccctatagcaatgatattgtatttaattctcatgccatccttttaagagagacaggacatgagcttggtaagttacttgctcaaatttatgtattcatttatatttgttaagctcctaccaaggggctggattccattctggactctggggatatggcaatgaataaaggcaacaaaaatccctgccctcatggagctttcattgtagttggggcagacagacaatcaacaaaaagtacaagtgaattatatgaaatgccagagggagataagtgtcattgagagacataaaacaagggagatgatggagagagggaggggagggttgcagttttagagagagtggtcatggaaagcctccacatgatggtgataaagaagctaaaaagaaattatttaggcagttgatgagggtaagagagtcctcagtcaggcttcccttttaacaaaaagcaggccccaaatcatttcttttctaacaaagagccacctgtaaaatcaatctgcagacataaataagcaagctggaagcttgcataggtaaatgccggcagctgtgcctataggaaaaggc

SEQ ID NO: 3466 - DNA, 20 bp, Homo sapiens
agggtgagagactgctctgg

SEQ ID NO: 3467 - DNA, 20 bp, Homo sapiens
ggagggagggaagaaagaga

SEQ ID NO: 3468 - DNA, 218 bp, Homo sapiens; identical to SEQ ID NO: 34

SEQ ID NO: 3469 - DNA, 2001 bp, Homo sapiens
ttctctacctttccaggtttatgagcaggaaccattgcttaagaaatactcaccatcaagcagaatcatgagggacagagcaccatgaactcagggagcaaagagaacactgtgggggtattcttagggatggaatctccacatcaaatctattggcaagacctggatgttcttggaaatgtgaaacattgaaaatgttgaacattaatcttctcctcatctccagtatcaacacccaactgaggccaccatcatttcttgggtttgggtggacaattgcaacagccacctatgactgctgtgactttgtctatgactccagttaatccatcctccactccaccgcctgaatgatctcttcaaaattcacagtaggtaatgacaccccagtggaaaatgctgattgccttctacttagaataaatcccaaattctttactgtggcctataaaaccctcagtgcaatcctctctggatgagctcatcatttttaagtctcaggttaaattagcggttctcaaaagggagcagtgttgccctttaagagacatttggcaatgttgggagatatttttggttgtcataagtggaagtcagggggtgctactggcatccagcggtcagaggccagggatgctgttgaacattctgcaatgcacagaatagtcccctatagcaaagaattgtctgacccaaaatatcagaagtgccaaagttaagaaatcctgacttaaaatcactttcctgtagtgactttatctgaccatctttatctcaaattggtttccatcccctatgctcttcatacctctaaccacaatttgcaattcccttcttattgtcatttacatacatgtaagctccacataccgggctatggacaaagtatgtcttgtccaactttgttgtctcaacatgtaccacttagcagatgctcaataaatatttgtaggaagaagaagggcaggaagggggaagggcaagaagaaaaggcagtcaaagtgaagcagcacccctgcccttctgagcccctttcagtatcatgctgactctcatcttcatgtggaaaacctgccatttgactgggccagttgcactgattatgttttaccggagaatgagccgagtggactaggaaaacactttaaaactcagttgtggggcagggtagggggtgggggcattggcatgaaaatgtttagatttcttcagtattgactttgttttgtcaaacaagtcctcttgagggtagggaccatgtctagttcagtctccgctgtagctccagcaccttgcatagtgcgtagtgcagacatagtgggtttcccaaaagtgtttgtgaatatgtgagtacccccccagcctgcaggggagggagggttgataccccactgcacccacttcttcagcagctcataaacccacttatgaagccaaccttcaggtcagactcttgcttttcttcttattagtggcccttaaaagagcattgccaataaaaacttcagctctggaaaagaattctggcctttgtcagctatttccgacagcccttgaaagaaaaataaatttggctccaagttttcccatgcctgtttatagttcctcacacaaagctctgccgtttatacaattttgtcacccagagacccagctaactctatctcagaggcagcctctcccgtccccacctcagcagcctccactccaacttcctcctccccacttagggcttccaaggacccatgaggataagctgcaggctgtgaggtttctatagtacactccttcctggaatgactctgcctaaatttcacctttaagcctcagagattcatgttatcttattagcaacacaaaatggaaaagactgaaccctttcagtttaatctgctgagtttctgaggctgcagggaactcctccaaggaatgtgcttagcttttgttagaggaagttaaaaaaaaaaaaggcccaacatattatttggcataaatctactc

SEQ ID NO: 3470 - DNA, 2001 bp, Homo sapiens
cagaatcatgagggacagagcaccatgaactcagggagcaaagagaacactgtgggggtattcttagggatggaatctccacatcaaatctattggcaagacctggatgttcttggaaatgtgaaacattgaaaatgttgaacattaatcttctcctcatctccagtatcaacacccaactgaggccaccatcatttcttgggtttgggtggacaattgcaacagccacctatgactgctgtgactttgtctatgactccagttaatccatcctccactccaccgcctgaatgatctcttcaaaattcacagtaggtaatgacaccccagtggaaaatgctgattgccttctacttagaataaatcccaaattctttactgtggcctataaaaccctcagtgcaatcctctctggatgagctcatcatttttaagtctcaggttaaattagcggttctcaaaagggagcagtgttgccctttaagagacatttggcaatgttgggagatatttttggttgtcataagtggaagtcagggggtgctactggcatccagcggtcagaggccagggatgctgttgaacattctgcaatgcacagaatagtcccctatagcaaagaattgtctgacccaaaatatcagaagtgccaaagttaagaaatcctgacttaaaatcactttcctgtagtgactttatctgaccatctttatctcaaattggtttccatcccctatgctcttcatacctctaaccacaatttgcaattcccttcttattgtcatttacatacatgtaagctccacataccgggctatggacaaagtatgtcttgtccaactttgttgtctcaacatgtaccacttagcagatgctcaataaatatttgtaggaagaagaagggcaggaagggggaagggcaagaagaaaaggcagtcaaggtgaagcagcacccctgcccttctgagcccctttcagtatcatgctgactctcatcttcatgtggaaaacctgccatttgactgggccagttgcactgattatgttttaccggagaatgagccgagtggactaggaaaacactttaaaactcagttgtggggcagggtagggggtgggggcattggcatgaaaatgtttagatttcttcagtattgactttgttttgtcaaacaagtcctcttgagggtagggaccatgtctagttcagtctccgctgtagctccagcaccttgcatagtgcgtagtgcagacatagtgggtttcccaaaagtgtttgtgaatatgtgagtacccccccagcctgcaggggagggagggttgataccccactgcacccacttcttcagcagctcataaacccacttatgaagccaaccttcaggtcagactcttgcttttcttcttattagtggcccttaaaagagcattgccaataaaaacttcagctctggaaaagaattctggcctttgtcagctatttccgacagcccttgaaagaaaaataaatttggctccaagttttcccatgcctgtttatagttcctcacacaaagctctgccgtttatacaattttgtcacccagagacccagctaactctatctcagaggcagcctctcccgtccccacctcagcagcctccactccaacttcctcctccccacttagggcttccaaggacccatgaggataagctgcaggctgtgaggtttctatagtacactccttcctggaatgactctgcctaaatttcacctttaagcctcagagattcatgttatcttattagcaacacaaaatggaaaagactgaaccctttcagtttaatctgctgagtttctgaggctgcagggaactcctccaaggaatgtgcttagcttttgttagaggaagttaaaaaaaaaaaaggcccaacatattatttggcataaatctactcatctaatttagattgtagaaacctattgattaggttcccaagcctgtcactttttcccta

SEQ ID NO: 3471 - DNA, 2001 bp, Homo sapiens
tgctgtctctgcctgtcccaagatgccaggagtttgacctgccgtgcttttcggtgcaaatgtcaacacagtgaaaaagataaacaacagtttagtgttattgtgaaaatagttttgacctcccctatctccagggatcgacgggccaaacattgaaaactgttacattactgggacaaaactcccaagatgggttgtaggaggaaggagggaggggctgttatattctgactttaatatcatttgctcagagataggagcatagaaaagatcccctatgcctgaaatttatctcctaaacctctcaccccacatgttattttccatttccttttctgattctgcatagaatgtgtcctgagagacacatttttttcctcaccccagggcaaactaaatagcacaggcagaacccagctggaagcaccctcttcatctcccacctatgtaaaaattaatctttttttccctaccagttattgcctaacactagtgcttatcacaaagaaaaggctgcaagaacaaagtgctctgtgagataaggaatttaagataagtgagctggcagaggataaaatccaatccccttcacacagctgctcccaacacctggcttccccattaacaccactcccaggactatttaagtcttagtcatcttccaggtctcaactgggacaccacttcccacctcttgtctgcctatctgtgcctatctcgctccctctctccatataggaaatacagatatagagacagagatagacattaacagatagatagatattgaaatatagattatcatagtgccttaattgttgggtaagctgattttcccactagatggcaaattccaaaaaagtggcagtcattttctgtcccattcaccctcaggggttttaaaacactgagatgatgtgtttgagcattagttaaggacatgcttttagatggggaatgcctttccttacagcaccattccccactgcatcttactgtcataagagtgcctcactcattgacctgtctggtcccacacagaactggaatttgccagtcacactgcaactgggaccagagtcatccctcgataaccatttgtcagaggattggagggatgagtcttttcttttcaggttgggtaaagtatagaactaggtgggaatcggtgctacgttatcgggccactccacactagccatggccctcaggatgtccctccatctacaggtgtcccgtggtgcttggtacccttctccactgcatcctagcgtgttcagtctcaccagggagactatcatcttctaggggatggaatctgatctctattcctttcttctctttcccatcttgccttgtctctttccctcacatttgaccacttatttatttattttttttttagatggaatctcactgtatcacccaggctgcagtgcagtggtgccatctcggctcactgcaacctctgcctcccgggtttgagcaattcttctgcctcagcctccagagtagctgggactacaggcacatgccaccacacccagctattttttttttttttttttttggtatttttagtagagacagggtttcaccacgtttgccaggctgttcttgaactcctgacctcaggtgatccacctgcctctgcctcccaaagtgctgggattacaggcgtgagccacggcacccatggtgaccacttacaggttgcagtcttcttaagacacctaggtagatagccagaaagtcagttcataaagaggataatactctttcaagcaggaggcctccattcctggaaaatcaagtgtttcaggaagcagagaagtgttgagtcttagggatggggaaggactggaggcagggaaattgtgatgggcatttgggaaggtagactcaggtcagattgggtggggccctgaaggccgtgctcaagaatgtggatcctttcctgcagacattgggcgtggcgtgatccaacctgtgttccatgag

SEQ ID NO: 3472 - DNA, 1002 bp, Homo sapiens
acttgattttccaggaatggaggcctcctgcttgaaagagtattatcctctttatgaactgactttctggctatctacctaggtgtcttaagaagactgcaacctgtaagtggtcaccatgggtgccgtggctcacgcctgtaatcccagcactttgggaggcagaggcaggtggatcacctgaggtcaggagttcaagaacagcctggcaaacgtggtgaaaccctgtctctactaaaaataccaaaaaaaaaaaaaaaaaaaatagctgggtgtggtggcatgtgcctgtagtcccagctactctggaggctgaggcagaagaattgctcaaacccgggaggcagaggttgcagtgagccgagatggcaccactgcactgcagcctgggtgatacagtgagattccatctaaaaaaaaaataaataaataagtggtcaaatgtgagggaaagagacaaggcaagatgggaaagagaagaaaggaatagagatcagattctcatcccctagaagatgatagtctccctggtgagactgaacacgctaggatgcagtggagaagggtaccaagcaccacgggacacctgtagatggagggacatcctgagggccatggctagtgtggagtggcccgataacgtagcaccgattcccacctagttctatactttacccaacctgaaaagaaaagactcatccctccaatcctctgacaaatggttatcgagggatgactctggtcccagttgcagtgtgactggcaaattccagttctgtgtgggaccagacaggtcaatgagtgaggcactcttatgacagtaagatgcagtggggaatggtgctgtaaggaaaggcattccccatctaaaagcatgtccttaactaatgctcaaacacatcatctcagtgttttaaaacccctgagggtgaatgggacagaaaatgactgccacttttttggaatttgccatctagtgggaaaatcagcttacccaacaat

SEQ ID NO: 3473 - DNA, 20 bp, Homo sapiens
aaaagggggaaaggatgagt

SEQ ID NO: 3474 - DNA, 21 bp, Homo sapiens
cacatgtgtttgtttggttgc

SEQ ID NO: 3475 - DNA, 51 bp, Homo sapiens
ttcctttggctttttttttttttttytttcgaggtactgtaaattgttaac

SEQ ID NO: 3476 - DNA, 801 bp, Homo sapiens
tacaaaaaattaggtgggcatggtggtgggcgcctgtaatcccagctacttgagaggctgaggcaggagaactgctggaacccgggaggtggaggttgtggtgagctgagatcacaccactgcactccagcctgggaaacaagagcaaaactccatctcaaaaaaaaaagaaaaaaaagggggaaaggatgagtttacaaagaaccacaacaaaccagaggtaatcgttataacagttttattcaagtctctgtgtgctctggcattgagaccaggctgagatcagcattacactgtaatacaataagaggtttagccattgaaccaagcctgcttggcatccctagttaacaatttacagtacctcgaaagaaaaaaaaaaaaaagccaaaggaaagaacctggtaagtttccttcaggactttttcatctttaaatattgttgacaacatacaataacttaaatcccaaagcaaagtgggaattcaaggacacggggtcaggacacatgaacaagacactggagcagagaaggtctagggataaaaactagtagctaattacagagcaaccaaacaaacacatgtgtgaactttcacttcacctagacttaaaagccctaagggggaggaaaaatcccaaagaaagcttttctgtgaactaagtaaaacccatctccaattcctttccttaatcctctacaagccttagactataagatatctgggtttcggtggggagtgcaggatgagtagggagggaaatcagaaaagaaagtgagcaagttcatcacctcccttc

SEQ ID NO: 3477 - DNA, 1002 bp, Homo sapiens
acagttttattcaagtctctgtgtgctctggcattgagaccaggctgagatcagcattacactgtaatacaataagaggtttagccattgaaccaagcctgcttggcatccctagttaacaatttacagtacctcgaaagaaaaaaaaaaaaaagccaaaggaaagaacctggtaagtttccttcaggactttttcatctttaaatattgttgacaacatacaataacttaaatcccaaagcaaagtgggaattcaaggacacggggtcaggacacatgaacaagacactggagcagagaaggtctagggataaaaactagtagctaattacagagcaaccaaacaaacacatgtgtgaactttcacttcacctagacttaaaagccctaagggggaggaaaaatcccaaagaaagcttttctgtgaactaagtaaaacccatctccaattcctttccttaatcctctacaagccttagactataagatatctgggtttcgtgtggggagtgcaggatgagtagggagggaaatcagaaaagaaagtgagcaagttcatcacctcccttctttgctacaactgtgtatcaaaggcatgtggctcaatgtgacaaaaaggcaaaagcctgacctcaagtgcccagggaggagacacaagctacaataaggcttccaagctcaagagactgagagaaaagtgaggagaagctggaatgaagagcagcaacagggcacctgcaggctggaaacaggagagaggctcacggccttcagtggtattgggagaagagctacagaattgacatgtccagctcctgtgtgcttcaaacccctggagtcatggagaggaaacagggcgaggaaggcagccagcagcatcaaggatgtcagctgagacgtgcgagggttcaagtccagtcacaggcagatgacaggtgagccaaggacacaactcctccttgggcaaagggcaatctcaaaacctcggtggacctgagctag

SEQ ID NO: 3478 - DNA, 20 bp, Homo sapiens
aaggagcctctctgccataa

SEQ ID NO: 3479 - DNA, 20 bp, Homo sapiens
cctgggtgtgacatttcctt

SEQ ID NO: 3480 - DNA, 120 bp, Homo sapiens
aaggagcctctctgccataatcacttcccttctccagagaacacacacacacacaagtgccctcagggctgcagagccagaaaggcagccagagaacaccaaggaaatgtcacacccagg

SEQ ID NO: 3481 - DNA, 2001 bp, Homo sapiens
aatacccacatcccagaattattgtaaggagtcaaaaattatatatatatgaatcactaggacagcaccgccccccacgtggaaaaaaattaatgatttcttatcatgtattattcgtctttataactaggccaggatacatctttgcctcactctgatggtgatgaagaaaagagccacagccagcatggcatctgaactggaggtagagataaacgatgagaatgaaataaagatgacagaggatgaggagggtggtggaaacgatactagcagagggtgtgatgggccaaattctgaagactcactgtgcaggcacagagctagggaatgtggctcttagcatgccagggagtgaaaaagcctccgttcactttagtcccttctgaaatctggacgagagaatgaatgaagttcattcacttctggaattcaaacatgttccaaagaggtttaagaggagaatctaaaggagcctctctgccataatcacttcccttctccagagaacacacacacacacaagtgccctcagggctgcagagccagaaaggcagccagagaacaccaaggaaatgtcacacccaggtatagatccaaagttaaaagctcctagatgtttcattgctgtaagcctacacactcctatttaaatgcgagcaccgccagagagccactgcctcactcaggacctgaggggaagggcaagtaaaaatttaaaacgtatttcacagtggtacctaagcccctctcacaggtccaggtgaggggcaggcagggctgggtatagagtggagtgaggccctcaccttgggttaaaatttaaaggggtgccaaaaaaaaaagagcctcagtaatcaaggtaaatcatattgcaatgcagtattttttaaaaatcagagttattgaaaaattccacgatgaatacagtatcaaaattttaagtcaggctttgtctgggttggtgtccaggtgtgaaggatctcaggaacaggcagcacactatttctgaaacctggccttggacttcagtgagcgcagggcaaggaacaccacggccctggggccctcgctccccagggctccgcttgtgactactctgacctctgggttcagaatgcccagacgtctatccctcatgttccggtaggagaggcctgtctgtgcacccctggaatggtattctgctgtccaatcctgagacacctaactagttagacacctatctcgatagacacctgtcatgtccacatctgccaatcagcctagtaaaactaggtgatgagtgctttcaaagagggcaggtcagaccagacaggtaggaagatgggtcaggtgaaaggcaggtctgtttccaagggttaacaaagagaggtgtggaaaagctcagctcctataaccagctgggccccaaagctcttctctctatccagctcaaggcccaaagcaggctccccgtaggggatggggaaccacagacagtaagaatcaggaaggaccagtcccaccggctcctgatcatggagtgagcccaacacgaagagcaaagccagggctccctaggcagcctacagaggcccccgtacttccagggcccaagacgggaaatggatgaggaagcgggtggacatgactgtcaatatctcatcaggacaaaatgagaaagagcagtctgagaggaagtccataagagactcacctggcctgcacggctaaccataagtcccgggctgagtcatgataattaggcacctaaaccctgttaattagccttaatcggcaggatttcagcttcctcctcctgccttccaacaccagcacctgagtggtgagcacccacccaggtagcaatgccagggaaaagcccaggactgaggtcctctccagaaatagcaatggattttcctttcatatgtgaattttcattaatttgaattcctaatctaggaatacgctgatccgacagaagagatgcatttggtaatgcgtttctaacaatag

SEQ ID NO: 3482 - DNA, 20 bp, Homo sapiens
gccaaagagagaggcaggta

SEQ ID NO: 3483 - DNA, 19 bp, Homo sapiens
ccagattgcttcccttggt

SEQ ID NO: 3484 - DNA, 135 bp, Homo sapiens; identical to SEQ ID NO: 35

SEQ ID NO: 3485 - DNA, 20 bp, Homo sapiens
gatggaaacagggccacttc

SEQ ID NO: 3486 - DNA, 20 bp, Homo sapiens
gatttatccgaacctggtct

SEQ ID NO: 3487 - DNA, 700 bp, Homo sapiens
gatggaaacagggccacttcagagggtctcctgccctgcagggcctttctacccgtgtccactggaggggctgtggccatcagctctggctgtgtaggggaggaaggggtgcatgcatgtcccccaccctccacagtcttccttgcctttagagtgaccctgcagagtcactcagccaaatctgtctgctgctccctctcctcagccagttgggtgtgcgcagagctgtcatagggtccctttgtcagccccgagttcagcttcccaaacaccagtgttggatattctgtgattgattttggtcctcctccgctgtcccccaacacccaggaatgggaatctggcttggttcgagataggagcttttctgtgtcctaagccctttcatgctagcaggaagactgaaagcaaggtggcccagtgtggggtcatagggcttgatagacctggcactgcctatctgcacttccaggtgccccacctatttatctgagcccacaggtggaaaggggaactgcctcagtgagaacggggggacggggatgttaggaaaaatacagtaaagttgcaatgaagaggttcatgaagtatgtccttgttctttttggaaactctcggcaaagggcaaaccagcaagtattgagggtacccatctagctacttggggtcaggacctcgtcagaccaggttcggataaatc

SEQ ID NO: 3488 - DNA, 801 bp, Homo sapiens
tggccatatggtattctgcttcatagctgttctagggcattgcggtgatatctactaaccaaacataaccaaaagcccacaaactccagggattagagtgaagaccaaaggaagggagtaacacataaagttcagacagcaaaaggaacagacagtggaattttgtctctgacttagaactggcaccagtgagtgagtcccccaagaaactattcctgggatgagcagatgattgtatccgaacctggtctgacgaggtcctgaccccaagtagctagatgggtaccctcaatacttgctggtttgccctttgccgagagtttccaaaaagaacaaggacatacttcatgaacctcttcattgcaactttactgtatttttcctaacatccccgtccccccgttctcactgaggcagttcccctttccacctgtgggctcagataaataggtggggcacctggaagtgcagataggcagtgccaggtctatcaagccctatgaccccacactgggccaccttgctttcagtcttcctgctagcatgaaagggcttaggacacagaaaagctcctatctcgaaccaagccagattcccattcctgggtgttgggggacagcggaggaggaccaaaatcaatcacagaatatccaacactggtgtttgggaagctgaactcggggctgacaaagggaccctatgacagctctgcgcacacccaactggctgaggagagggagcagcagacagatttggctgagtgactctgcagggtcactctaaaggcaaggaagactgtgg

SEQ ID NO: 3489 - DNA, 21 bp, Homo sapiens
caacagctccagcacagagac

SEQ ID NO: 3490 - DNA, 22 bp, Homo sapiens
aaaggcaaggaagactgtggag

SEQ ID NO: 3491 - DNA, 630 bp, Homo sapiens
cgtccttctgccaaccggcaacggctggacccttggtggtttgtgtcccccagccatgcccgcagcacctccccagccaacagctccagcacagagacgcccagcaacctggactcctgctttgctagcagtagcagcactgtagaggagcggcctggacttccagccctgctcccgttccaggcagggccgctgcccccgactgagcggacgctcctggacctggatgcagaggggcagagtcaggacagcaccgtgccgctgtgcagagcggaactgaacacacacaggcctgccccttatgagatccagcaggagttctggtcttagcacgaaaaggattggggcgggcaagggggacagccagcggagatgaggggagctggcgggcacagccctttctcagggttggaccccctgagatccagccctacttcttgcactgataatgcactttgaagatggaagggatggaaacagggccacttcagagggtctcctgccctgcagggcctttctacccgtgtccactggaggggctgtggccatcagctctggctgtgtaggggaggaaggggtgcatgcatgtcccccaccctccacagtcttccttgcctttagagtgaccct

SEQ ID NO: 3492 - DNA, 22 bp, Homo sapiens
cattacatgtgacccccaaatg

SEQ ID NO: 3493 - DNA, 22 bp, Homo sapiens
cgctcctctacagtgctgctac

SEQ ID NO: 3494 - DNA, 630 bp, Homo sapiens
tttgccaacatctgccttcagttatttcattacatgtgacccccaaatgtcctattattcttatcagatacagggatcatggcattctaggtcactactgtatccccagtgcctcccagtaggtgctccacaaacatttggtgattcatgttctcctgattgcgtagggatatggtggtgttgggggggagtagcggatatctaaccccgaaatatggtgcctcatctgatgcttctccttttgtctttttgaccaggaatgttgaaaacccccagtcccagccgagacccaggtgaattcccccgtctccctgaccccaatgtggtcttccccccaaccccaaggcgctggaacactcagcaggactctaccttggagagacccaagactctggagtttctgcctcggccgcgtccttctgccaaccggcaacggctggacccttggtggtttgtgtcccccagccatgcccgcagcacctccccagccaacagctccagcacagagacgcccagcaacctggactcctgctttgctagcagtagcagcactgtagaggagcggcctggacttccagccctgctcccgttccaggcagggccgctgcccccgactgagcggacgctcct

SEQ ID NO: 3495 - DNA, 22 bp, Homo sapiens
cattacatgtgacccccaaatg

SEQ ID NO: 3496 - DNA, 22 bp, Homo sapiens
cgctcctctacagtgctgctac

SEQ ID NO: 3497 - DNA, 1659 bp, Homo sapiens
gccgtacagtttctgttgtaactaaactacgctgccgtagtgggaaagcagacactggatgtggctgtgtttcaataaaatgttattgtatacctttttttcttttttttgagacaaagtttctgtcacccaggctggagtgcagtggtgtgatcacagctcactgcagcctcaacctcctgggctcaagtgatcctcttgcctcagcctcccaagtagctgggactacaggcatggaccatcatgcctggctaattttgcaaaaaaattttgtagagatggggtttcatcatgttgcccaagctgttcttgaactcctggggttaagtgatcctcctgccttggcctcccaaagtgctgggattataggcatgagccactgtactccacctaaaaccttgtttataaacacaggtggccagcttgtgtgtcatttgccaacatctgccttcagttatttcattacatgtgacccccaaatgtcctattattcttatcagatacagggatcatggcmttctaggtcactactgtatccccagtgcctcccagtaggtgctccacaaacatttggtgattcatgttctcctgattgcgtagggatatggtggtgttgggggggagtagcggatatctaaccccgaaatatggtgcctcatctgatgcttctccttttgtctttttgaccaggaatgttgaaaacccccagtcccagccgagacccaggtgaattcccccgtctccctgaccccaatgtggtcttccccccaaccccaaggcgctggaacactcagcaggactctaccttggagagacccaagactctggagtttctgcctcggccgcgtccttctgccaaccggcaacggctggacccttggtggtttgtgtcccccagccatgcccgcagcacctccccagccaacagctccagcacagagacgcccagcaacctggactcctgctttgctagcagtagcagcactgtagaggagcggcctggacttccagccctgctcccgttccaggcagggccgctgcccccgactgagcggacgctcctggacctggatgcagaggggcagagtcaggacagcaccgtgccgctgtgcagagcggaactgaacacacacaggcctgccccttatgagatccagcaggagttctggtcttagcacgaaaaggattggggcgggcaagggggacagccagcggagatgaggggagctggcgggcacagccctttctcagggttggaccccctgagatccagccctacttcttgcactgataatgcactttgaagatggaagggatggaaacagggccacttcagagggtctcctgccctgcagggcctttctacccgtgtccactggaggggctgtggccatcagctctggctgtgtaggggaggaaggggtgcatgcatgtcccccaccctccacagtcttccttgcctttagagtgaccctgcagagtcactcagccaaatctgtctgctgctccctctcctcagccagttgggtgtgcgcagagctgtcatagggtccctttgtcagccccgagttcagcttcccaaacaccagtgttggatattctgtgattgattttggtcctcctccgctgtcccccaacacccaggaatgggaatctggc

SEQ ID NO: 3498 - DNA, 1002 bp, Homo sapiens
agctacttgggaggctgaggcaagaggatcacttgagcccaggaggttgaggctgcagtgagctgtgatcacaccactgcactccagcctgggtgacagaaactttgtctcaaaaaaaagaaaaaaaggtatacaataacattttattgaaacacagccacatccagtgtctgctttcccactacggcagcgtagtttagttacaacagaaactgtacggcctacaaagcctaaaatatttactatctggcccttcaccaaaaaagcttgctgcctcctgactcaagggcatgtctgttcatttactgctcatccatgtaataaacatgtgacgggaacagagctaggtatcagaagtccaaaggtgagtaatgtagggtttctgttcccaaagaggtcacatatctgagtataacaaaaaacaggagggcaggtcaagccaaacagttaaatacaactgttgttgacacttaaatctcattgaaagggtattactatgcctcccttttcctactggattagaggctgtttccaagtcagacttaggtcttccagggagaaagagatggtgacaggaaagagatggtgacaggaaagagtgtgtgtccccaggtgtcagatgtcgagggcagtcatatgcacggggatagcaatttgcctggactcatctccacgcctgaagaggcaggtatgagtcaggggtgagtgttgaagagtgtgatgaatgggtggaagcctgccttctgagtgtgtgtgaactaatgctataatgagaggcaaaatcccagctatgtggcagaaaatactgctcccacatgcagtgcaagattccttcctggaaaatgcatcatcctcctcagggaataactagaagctagactcctgcccttcctgtgccctgaaaacactaccctaccctaagactcagggtctggacattccaaaggagtcccaggtcttctgattcttcctagaacctgcctgtcttctttcaatcctcag

SEQ ID NO: 3499 - DNA, 21 bp, Homo sapiens
gctctccctctcctccatctc

SEQ ID NO: 3500 - DNA, 22 bp, Homo sapiens
cccgaagtggaaagagaaaatg

SEQ ID NO: 3501 - DNA, 551 bp, Homo sapiens
tttcaagaaggaggagcccatgctgttgctaggagacccctctgcctccctgacgctgctctccctctcctccatctccgagtgcaactccacacgctccctgctgcgctccgacagcgatgaaattgtcgtgtatgagatgccagtcagcccagtcgaggcccctcccctgagtccatgtacccacaaccccctggtcaatgtccgagtagagcgcttcaaacgagatcctaaccaatctctgactcccacccatgtcaccctcaccaccccctcgcagcccagcagtcaccggcggactccttctgatggggcccttaagccagagactctcctagccagcaggagcccctccagcaatgggttgagccccagtcctggagcaggtgagtcttcttcctcttttctctttcctttctttgtgcctcctcagggagtgaagatgtttgcaggcctcattttctctttccacttcgggatttgagtgaacaccattcctcctcttagccaatcaagaaatacagatctgggatcagggaggcagccagggc

SEQ ID NO: 3502 - DNA, 19 bp, Homo sapiens
gccaaccaacagcctcaag

SEQ ID NO: 3503 - DNA, 22 bp, Homo sapiens
ggctgactggcatctcatacac

SEQ ID NO: 3504 - DNA, 496 bp, Homo sapiens
accccagtcaactcggccacgagtacccctcagctgacgccaaccaacagcctcaagcggggcggtgcccaccaccgccgctgcgaggtggctctgctcggctgtggggctgttctggcagccacaggcctagggtttgacttgctggaagctggcaagtgccagctgcttcccctggaggagcctgagccaccagcccgggaggagaagaaaagacgggagggtctttttcagaggtccagccgtcctcgtcggagcaccagccccccatcccgaaagcttttcaagaaggaggagcccatgctgttgctaggagacccctctgcctccctgacgctgctctccctctcctccatctccgagtgcaactccacacgctccctgctgcgctccgacagcgatgaaattgtcgtgtatgagatgccagtcagcccagtcgaggcccctcccctgagtccatgtacccacaaccccctggtcaatgtccgagtagagc

SEQ ID NO: 3505 - DNA, 21 bp, Homo sapiens
gctctccctctcctccatctc

SEQ ID NO: 3506 - DNA, 22 bp, Homo sapiens
cccgaagtggaaagagaaaatg

SEQ ID NO: 3507 - DNA, 1463 bp, Homo sapiens
cagattcttattcctgccacctcatttccatttcctgtttctcttccactcttgtcatcttcacagaggatgaggacagtgaaggcccagggagtggagagagtcgcctacagcattcacccagccagtcctacctctgtatcccattccctcgtggagaggatggcgatggcccctccagtgatggaatccatgaggagcccaccccagtcaactcggccacgagtacccctcagctgacgccaaccaacagcctcaagcggggcggtgcccaccaccgccgctgcgaggtggctctgctcggctgtggggctgttctggcagccacaggcctagggtttgacttgctggaagctggcaagtgccagctgcttcccctggaggagcctgagccaccagcccgggaggagaagaaaagacgggagggtctttttcagaggtccagccgtcctcgtcggagcaccagccccccatcccgaaagcttttcaagaaggaggagcccatgctgttgctaggagacccctctgcctccctgacgctgctctccctctcctccatctccgagtgcaactccacacgctccctgctgcgctccgacagcgatgaaattgtcgtgtatgagatgccagtcagcccagtcgaggcccctcccctgagtccatgtacccacaaycccctggtcaatgtccgagtagagcgcttcaaacgagatcctaaccaatctctgactcccacccatgtcaccctcaccaccccctcgcagcccagcagtcaccggcggactccttctgatggggcccttaagccagagactctcctagccagcaggagcccctccagcaatgggttgagccccagtcctggagcaggtgagtcttcttcctcttttctctttcctttctttgtgcctcctcagggagtgaagatgtttgcaggcctcattttctctttccacttcgggatttgagtgaacaccattcctcctcttagccaatcaagaaatacagatctgggatcagggaggcagccagggctggctgacttttctctgacctgtgcctcaggggtcttccctgaggattgaaagaagacaggcaggttctaggaagaatcagaagacctgggactcctttggaatgtccagaccctgagtcttagggtagggtagtgttttcagggcacaggaagggcaggagtctagcttctagttattccctgaggaggatgatgcattttccaggaaggaatcttgcactgcatgtgggagcagtattttctgccacatagctgggattttgcctctcattatagcattagttcacacacactcagaaggcaggcttccacccattcatcacactcttcaacactcacccctgactcatacctgcctcttcaggcgtggagatgagtccaggcaaattgctatccccgtgcatatgactgccctcgacatctgaca

SEQ ID NO: 3508 - DNA, 22 bp, Homo sapiens
ctctaaggaaatgggctctgga

SEQ ID NO: 3509 - DNA, 22 bp, Homo sapiens
gcttccagcaagtcaaacccta

SEQ ID NO: 3510 - DNA, 630 bp, Homo sapiens
tcactatcacagatcccttatgaaagaaatggcaaattagcggatcttttattctgctctaaggaaatgggctctggaatggagagtggtttccctgtgttggggggtggataaagcccccttggttcagtgttcaattccatgtcctgctcatcacaccattgaacctttgtgtccctgagactgagacaggaggcctggggtgaggggaaagggccagattcttattcctgccacctcatttccatttcctgtttctcttccactcttgtcatcttcacagaggatgaggacagtgaaggcccagggagtggagagagtcgcctacagcattcacccagccagtcctacctctgtatcccattccctcgtggagaggatggcgatggcccctccagtgatggaatccatgaggagcccaccccagtcaactcggccacgagtacccctcagctgacgccaaccaacagcctcaagcggggcggtgcccaccaccgccgctgcgaggtggctctgctcggctgtggggctgttctggcagccacaggcctagggtttgacttgctggaagctggcaagtgccagctgcttcccctggaggagcctgagccaccagcccgggaggagaag

SEQ ID NO: 3511 - DNA, 2001 bp, Homo sapiens
atgagtcaggggtgagtgttgaagagtgtgatgaatgggtggaagcctgccttctgagtgtgtgtgaactaatgctataatgagaggcaaaatcccagctatgtggcagaaaatactgctcccacatgcagtgcaagattccttcctggaaaatgcatcatcctcctcagggaataactagaagctagactcctgcccttcctgtgccctgaaaacactaccctaccctaagactcagggtctggacattccaaaggagtcccaggtcttctgattcttcctagaacctgcctgtcttctttcaatcctcagggaagacccctgaggcacaggtcagagaaaagtcagccagccctggctgcctccctgatcccagatctgtatttcttgattggctaagaggaggaatggtgttcactcaaatcccgaagtggaaagagaaaatgaggcctgcaaacatcttcactccctgaggaggcacaaagaaaggaaagagaaaagaggaagaagactcacctgctccaggactggggctcaacccattgctggaggggctcctgctggctaggagagtctctggcttaagggccccatcagaaggagtccgccggtgactgctgggctgcgagggggtggtgagggtgacatgggtgggagtcagagattggttaggatctcgtttgaagcgctctactcggacattgaccagggggttgtgggtacatggactcaggggaggggcctcgactgggctgactggcatctcatacacgacaatttcatcgctgtcggagcgcagcagggagcgtgtggagttgcactcggagatggaggagagggagagcagcgtcagggaggcagaggggtctcctagcaacagcatgggctcctccttcttgaaaagctttcgggatggggggctggtgctccgacgaggacggctggacctctgaaaaagaccctcccgtcttttcttctcctcccgggctggtggctcaggctcctccaggggaagcagctggcacttgccagcttccagcaagtcaaaccctaggcctgtggctgccagaacagccccacagccgagcagagccacctcgcagcggcggtggtgggcaccgccccgcttgaggctgttggttggcgtcagctgaggggtactcgtggccgagttgactggggtgggctcctcatggattccatcactggaggggccatcgccatcctctccacgagggaatgggatacagaggtaggactggctgggtgaatgctgtaggcgactctctccactccctgggccttcactgtcctcatcctctgtgaagatgacaagagtggaagagaaacaggaaatggaaatgaggtggcaggaataagaatctggccctttcccctcaccccaggcctcctgtctcagtctcagggacacaaaggttcaatggtgtgatgagcaggacatggaattgaacactgaaccaagggggctttatccaccccccaacacagggaaaccactctccattccagagcccatttccttagagcagaataaaagatccgctaatttgccatttctttcataagggatctgtgatagtgacttgggtatccacttgactggactgagggatgcctgcatggctggtgaagcacagttgctgggtgtgtctgtgaggctgtttccaggggagactaagatgggagtcagggggcagggagaggaagacccaccttcaatgtcgatgggcaccacccaactggctgccagcaaggctagaacaaagcaggcagaaaaagggggatgctcagtttgctgagcttcctctctctgtttctcccttctggagagggacactttttctcctcttgcccttggaaatcagagtccaggttcttcagcctttggactctcagacttgtaactgaggcctttcggaggctctcaggcctcagactgggagctgcactgctggtttccctggtgttaaggctttcaaa

SEQ ID NO: 3512 - DNA, 21 bp, Homo sapiens
cctctccagaagggagaaaca

SEQ ID NO: 3513 - DNA, 20 bp, Homo sapiens
tccgctaatttgccatttct

SEQ ID NO: 3514 - DNA, 497 bp, Homo sapiens
ccagggaaaccagcagtgcagctcccagtctgaggcctgagagcctccgaaaggcctcagttacaagtctgagagtccaaaggctgaagaacctggactctgatttccaagggcaagaggagaaaaagtgtccctctccagaagggagaaacagagagaggaagctcagcaaactgagcatccccctttttctgcctgctttgttctagccttgctggcagccagttgggtggtgcccatcgacattgaaggtgggtcttcctctccctgccccctgactcccatcttagtctcccctggaaacagcctcacagacacacccagcaactgtgcttcaccagccatgcaggcatccctcagtccagtcaagtggatacccaagtcactatcacagatcccttatgaaagaaatggcaaattagcggatcttttattctgctctaaggaaatgggctctggaatggagagtggtttccctgtgttggggggtggataaa

SEQ ID NO: 3515 - DNA, 21 bp, Homo sapiens
cctctccagaagggagaaaca

SEQ ID NO: 3516 - DNA, 20 bp, Homo sapiens
tccgctaatttgccatttct

SEQ ID NO: 3517 - DNA, 1876 bp, Homo sapiens
ttctttctacagttccacagcagcatgtgagggggatgggtcatgtcattgcccttttcttccctggagcatgtgcatttctgtttgtgaagcaggtgggcttggtaagagtcattgcctgtatgtactccaaggttctttggtagaatgaagcaggcagggagaaacgtctccatagacccatggagctgagggtcaagtaagaaaggtaaccagttctgacagtttcctcttttcctctgattcagcctcaagtccctggtagatggatataagcagtggtcgtccagtgcccccaacctggtgaagggcccaaggagtagcccggccctgccagggttcaccagccttatggagatgggtaagcatagctcctcttgagagtcttggctgtctccctgctccctgggggcattcttgcccaagcttctaggaccatttaaggacccctagcactgcttcatggaggaaacattgggaatgtttttgttctagaatgttcagtgttctagaaactcatactacacttgtattaaggggccggtattagtcagggttctccagagggagagaaccaatagcaaccaaaaggaagtttattagggagaattgtctcacacagttacaaaggcaaagtcccatgacaggccgtctgcaagctggagaatgagaaaagcctgtagtatggctcccagggaagacagtagagtggctcaatcccagtttgaaagccttaacaccagggaaaccagcagtgcagctcccagtctgaggcctgagagcctccgaaaggcctcagttacaagtctgagagtccaaaggctgaagaacctggactctgatttccaagggcaagaggagaaaaagtgtccctctccagaagggagaamcagagagaggaagctcagcaaactgagcatccccctttttctgcctgctttgttctagccttgctggcagccagttgggtggtgcccatcgacattgaaggtgggtcttcctctccctgccccctgactcccatcttagtctcccctggaaacagcctcacagacacacccagcaactgtgcttcaccagccatgcaggcatccctcagtccagtcaagtggatacccaagtcactatcacagatcccttatgaaagaaatggcaaattagcggatcttttattctgctctaaggaaatgggctctggaatggagagtggtttccctgtgttggggggtggataaagcccccttggttcagtgttcaattccatgtcctgctcatcacaccattgaacctttgtgtccctgagactgagacaggaggcctggggtgaggggaaagggccagattcttattcctgccacctcatttccatttcctgtttctcttccactcttgtcatcttcacagaggatgaggacagtgaaggcccagggagtggagagagtcgcctacagcattcacccagccagtcctacctctgtatcccattccctcgtggagaggatggcgatggcccctccagtgatggaatccatgaggagcccaccccagtcaactcggccacgagtacccctcagctgacgccaaccaacagcctcaagcggggcggtgcccaccaccgccgctgcgaggtggctctgctcggctgtggggctgttctggcagccacaggcctagggtttgacttgctggaagctggcaagtgccagctgcttcccctggaggagcctgagccaccagcccgggaggagaagaaaagacgggagggtctttttcagaggtccagccgtcctcgtcggagcaccagccccccatcccgaaagcttttcaagaaggaggagcccatgctgttgctaggagacccctctgcctccctgac

SEQ ID NO: 3518 - DNA, 22 bp, Homo sapiens
ggtcatgtcattgcccttttct

SEQ ID NO: 3519 - DNA, 22 bp, Homo sapiens
acattcccaatgtttcctccat

SEQ ID NO: 3520 - DNA, 564 bp, Homo sapiens
tacagttccacagcagcatgtgagggggatgggtcatgtcattgcccttttcttccctggagcatgtgcatttctgtttgtgaagcaggtgggcttggtaagagtcattgcctgtatgtactccaaggttctttggtagaatgaagcaggcagggagaaacgtctccatagacccatggagctgagggtcaagtaagaaaggtaaccagttctgacagtttcctcttttcctctgattcagcctcaagtccctggtagatggatataagcagtggtcgtccagtgcccccaacctggtgaagggcccaaggagtagcccggccctgccagggttcaccagccttatggagatgggtaagcatagctcctcttgagagtcttggctgtctccctgctccctgggggcattcttgcccaagcttctaggaccatttaaggacccctagcactgcttcatggaggaaacattgggaatgtttttgttctagaatgttcagtgttctagaaactcatactacacttgtattaaggggccggtattagtcagggttctccagagggaga

SEQ ID NO: 3521 - DNA, 2001 bp, Homo sapiens
caatggtgtgatgagcaggacatggaattgaacactgaaccaagggggctttatccaccccccaacacagggaaaccactctccattccagagcccatttccttagagcagaataaaagatccgctaatttgccatttctttcataagggatctgtgatagtgacttgggtatccacttgactggactgagggatgcctgcatggctggtgaagcacagttgctgggtgtgtctgtgaggctgtttccaggggagactaagatgggagtcagggggcagggagaggaagacccaccttcaatgtcgatgggcaccacccaactggctgccagcaaggctagaacaaagcaggcagaaaaagggggatgctcagtttgctgagcttcctctctctgtttctcccttctggagagggacactttttctcctcttgcccttggaaatcagagtccaggttcttcagcctttggactctcagacttgtaactgaggcctttcggaggctctcaggcctcagactgggagctgcactgctggtttccctggtgttaaggctttcaaactgggattgagccactctactgtcttccctgggagccatactacaggcttttctcattctccagcttgcagacggcctgtcatgggactttgcctttgtaactgtgtgagacaattctccctaataaacttccttttggttgctattggttctctccctctggagaaccctgactaataccggccccttaatacaagtgtagtatgagtttctagaacactgaacattctagaacaaaaacattcccaatgtttcctccatgaagcagtgctaggggtccttaaatggtcctagaagcttgggcaagaatgcccccagggagcagggagacagccaagactctcaagaggagctatgcttacccatctccataaggctggtgaaccctggcagggccgggctactccttgggcccttcaccaggttgggggcactggacgaccactgcttatatccatctaccagggacttgaggctgaatcagaggaaaagaggaaactgtcagaactggttacctttcttacttgaccctcagctccatgggtctatggagacgtttctccctgcctgcttcattctaccaaagaaccttggagtacatacaggcaatgactcttaccaagcccacctgcttcacaaacagaaatgcacatgctccagggaagaaaagggcaatgacatgacccatccccctcacatgctgctgtggaactgtagaaagaactagtgggcaagctggcaagcagacagaaagaataaggatggccctgctggctgggggtcttgcctgagcccatctcaagagagaagcactcgaagcagacactggacacaacacattcatggcatgacagttacggtgatgcaaagacctgcgaagccaggcaagcaccgggcagccgagctagcagaggtggaccaggctactccacataaggcatttctcaggctttccttccaagctttatggcatgcttaggcaactttcaaagccatcccctttttaaaaggcaaaaccaacccacaaagctgcaccaacccagtgcactgtgggacagacctacgtgggtagtgcacagtgctgaagcagagcccttggtctgtctgggggtggagagacagaggacaggagctcgctttcaaatccctgtcatcagcccatatggaaagccggtaactctccgaggatacagcctgggcaccctgccaaccactttgtaggaggggggaaccagaggcctagaagcactggtcttttccctagaggacagtaaaagggaggactgaggaatctgtgggctatggttgccctggaaatattgggattatgaccagagtggctctttttttttttttttttaagtctaggaagaatcattcaactaaagaccactttccccaaagtcccagccatcttgagagagacagaggaccaactt

SEQ ID NO: 3522 - DNA, 2001 bp, Homo sapiens
agcaggacatggaattgaacactgaaccaagggggctttatccaccccccaacacagggaaaccactctccattccagagcccatttccttagagcagaataaaagatccgctaatttgccatttctttcataagggatctgtgatagtgacttgggtatccacttgactggactgagggatgcctgcatggctggtgaagcacagttgctgggtgtgtctgtgaggctgtttccaggggagactaagatgggagtcagggggcagggagaggaagacccaccttcaatgtcgatgggcaccacccaactggctgccagcaaggctagaacaaagcaggcagaaaaagggggatgctcagtttgctgagcttcctctctctgtttctcccttctggagagggacactttttctcctcttgcccttggaaatcagagtccaggttcttcagcctttggactctcagacttgtaactgaggcctttcggaggctctcaggcctcagactgggagctgcactgctggtttccctggtgttaaggctttcaaactgggattgagccactctactgtcttccctgggagccatactacaggcttttctcattctccagcttgcagacggcctgtcatgggactttgcctttgtaactgtgtgagacaattctccctaataaacttccttttggttgctattggttctctccctctggagaaccctgactaataccggccccttaatacaagtgtagtatgagtttctagaacactgaacattctagaacaaaaacattcccaatgtttcctccatgaagcagtgctaggggtccttaaatggtcctagaagcttgggcaagaatgcccccagggagcagggagacagccaagactctcaagaggagctatgcttacccatctccataaggctggtgaaccctggcagggccgggctactccttgggcccttcaccaggttgggggcactggacgaccactgcttacatccatctaccagggacttgaggctgaatcagaggaaaagaggaaactgtcagaactggttacctttcttacttgaccctcagctccatgggtctatggagacgtttctccctgcctgcttcattctaccaaagaaccttggagtacatacaggcaatgactcttaccaagcccacctgcttcacaaacagaaatgcacatgctccagggaagaaaagggcaatgacatgacccatccccctcacatgctgctgtggaactgtagaaagaactagtgggcaagctggcaagcagacagaaagaataaggatggccctgctggctgggggtcttgcctgagcccatctcaagagagaagcactcgaagcagacactggacacaacacattcatggcatgacagttacggtgatgcaaagacctgcgaagccaggcaagcaccgggcagccgagctagcagaggtggaccaggctactccacataaggcatttctcaggctttccttccaagctttatggcatgcttaggcaactttcaaagccatcccctttttaaaaggcaaaaccaacccacaaagctgcaccaacccagtgcactgtgggacagacctacgtgggtagtgcacagtgctgaagcagagcccttggtctgtctgggggtggagagacagaggacaggagctcgctttcaaatccctgtcatcagcccatatggaaagccggtaactctccgaggatacagcctgggcaccctgccaaccactttgtaggaggggggaaccagaggcctagaagcactggtcttttccctagaggacagtaaaagggaggactgaggaatctgtgggctatggttgccctggaaatattgggattatgaccagagtggctctttttttttttttttttaagtctaggaagaatcattcaactaaagaccactttccccaaagtcccagccatcttgagagagacagaggaccaactttttcgctgttcag

SEQ ID NO: 3523 - DNA, 2001 bp, Homo sapiens
ttgaacactgaaccaagggggctttatccaccccccaacacagggaaaccactctccattccagagcccatttccttagagcagaataaaagatccgctaatttgccatttctttcataagggatctgtgatagtgacttgggtatccacttgactggactgagggatgcctgcatggctggtgaagcacagttgctgggtgtgtctgtgaggctgtttccaggggagactaagatgggagtcagggggcagggagaggaagacccaccttcaatgtcgatgggcaccacccaactggctgccagcaaggctagaacaaagcaggcagaaaaagggggatgctcagtttgctgagcttcctctctctgtttctcccttctggagagggacactttttctcctcttgcccttggaaatcagagtccaggttcttcagcctttggactctcagacttgtaactgaggcctttcggaggctctcaggcctcagactgggagctgcactgctggtttccctggtgttaaggctttcaaactgggattgagccactctactgtcttccctgggagccatactacaggcttttctcattctccagcttgcagacggcctgtcatgggactttgcctttgtaactgtgtgagacaattctccctaataaacttccttttggttgctattggttctctccctctggagaaccctgactaataccggccccttaatacaagtgtagtatgagtttctagaacactgaacattctagaacaaaaacattcccaatgtttcctccatgaagcagtgctaggggtccttaaatggtcctagaagcttgggcaagaatgcccccagggagcagggagacagccaagactctcaagaggagctatgcttacccatctccataaggctggtgaaccctggcagggccgggctactccttgggcccttcaccaggttgggggcactggacgaccactgcttatatccatctaccagagacttgaggctgaatcagaggaaaagaggaaactgtcagaactggttacctttcttacttgaccctcagctccatgggtctatggagacgtttctccctgcctgcttcattctaccaaagaaccttggagtacatacaggcaatgactcttaccaagcccacctgcttcacaaacagaaatgcacatgctccagggaagaaaagggcaatgacatgacccatccccctcacatgctgctgtggaactgtagaaagaactagtgggcaagctggcaagcagacagaaagaataaggatggccctgctggctgggggtcttgcctgagcccatctcaagagagaagcactcgaagcagacactggacacaacacattcatggcatgacagttacggtgatgcaaagacctgcgaagccaggcaagcaccgggcagccgagctagcagaggtggaccaggctactccacataaggcatttctcaggctttccttccaagctttatggcatgcttaggcaactttcaaagccatcccctttttaaaaggcaaaaccaacccacaaagctgcaccaacccagtgcactgtgggacagacctacgtgggtagtgcacagtgctgaagcagagcccttggtctgtctgggggtggagagacagaggacaggagctcgctttcaaatccctgtcatcagcccatatggaaagccggtaactctccgaggatacagcctgggcaccctgccaaccactttgtaggaggggggaaccagaggcctagaagcactggtcttttccctagaggacagtaaaagggaggactgaggaatctgtgggctatggttgccctggaaatattgggattatgaccagagtggctctttttttttttttttttaagtctaggaagaatcattcaactaaagaccactttccccaaagtcccagccatcttgagagagacagaggaccaactttttcgctgttcagaattctgtttcaag

SEQ ID NO: 3524 - DNA, 2001 bp, Homo sapiens
gcttgcagacggcctgtcatgggactttgcctttgtaactgtgtgagacaattctccctaataaacttccttttggttgctattggttctctccctctggagaaccctgactaataccggccccttaatacaagtgtagtatgagtttctagaacactgaacattctagaacaaaaacattcccaatgtttcctccatgaagcagtgctaggggtccttaaatggtcctagaagcttgggcaagaatgcccccagggagcagggagacagccaagactctcaagaggagctatgcttacccatctccataaggctggtgaaccctggcagggccgggctactccttgggcccttcaccaggttgggggcactggacgaccactgcttatatccatctaccagggacttgaggctgaatcagaggaaaagaggaaactgtcagaactggttacctttcttacttgaccctcagctccatgggtctatggagacgtttctccctgcctgcttcattctaccaaagaaccttggagtacatacaggcaatgactcttaccaagcccacctgcttcacaaacagaaatgcacatgctccagggaagaaaagggcaatgacatgacccatccccctcacatgctgctgtggaactgtagaaagaactagtgggcaagctggcaagcagacagaaagaataaggatggccctgctggctgggggtcttgcctgagcccatctcaagagagaagcactcgaagcagacactggacacaacacattcatggcatgacagttacggtgatgcaaagacctgcgaagccaggcaagcaccgggcagccgagctagcagaggtggaccaggctactccacataaggcatttctcaggctttccttccaagctttatggcatgcttaggcaactttcaaagccatcccctttttaaaaggcaaaaccaacccacaaagctgcaccaacccagtgcactgtgggacagacctacgtgggtagtgcacagtgctgaagcagagcccttggtctgtctgggggtggagagacagaggacaggagctcgctttcaaatccctgtcatcagcccatatggaaagccggtaactctccgaggatacagcctgggcaccctgccaaccactttgtaggaggggggaaccagaggcctagaagcactggtcttttccctagaggacagtaaaagggaggactgaggaatctgtgggctatggttgccctggaaatattgggattatgaccagagtggctctttttttttttttttttaagtctaggaagaatcattcaactaaagaccactttccccaaagtcccagccatcttgagagagacagaggaccaactttttcgctgttcagaattctgtttcaagtgctatcagaaataccagcaaattaaagtacatcccaaccaccactggtttcaaccaaaatatagtcagagataagcctgctgccaaacccacagcctggggcttcctactgagactctcgtaacatcacttccagctctggatccaggaaaatccagattagtaaagtcaaaaccagtgctgaagaccaaaggataaatagccacatatctaagcctctctaaaaccaagagtgccaggagtatcctaattggagtggtcagtggagtgaagaatatggtaaaattagatcaacacaggaattttcccaaggtgcacaatggtactgcttaaaacaaaaacaaaaacaaaaaagtcagttcagccctggcaataacgaggcttgattctatggggtatgctgtaagaacaaggaaatggaagggagattgttaccaggacagctggtgaaagggtgaagatgagactcaccccaagtggaaatgtggagattctgatggggtacttaaaccattagctttctcacgtctctgaggggatcttcaatgaataaagagaatcagtagcaggcaatggagggcacatccagctcagcctc

SEQ ID NO: 3525 - DNA, 21 bp, Homo sapiens
atctttgtcctgggcctgtct

SEQ ID NO: 3526 - DNA, 22 bp, Homo sapiens
ggcaataacgaggcttgattct

SEQ ID NO: 3527 - DNA, 397 bp, Homo sapiens
gggatctttgtcctgggcctgtcttggcttaaacaggaccatcttgttaagattctttcatggtgtgggctttgtgtctggacagtgggaaggcagctggcgatgtggtgtgaatccagccttgggtgttttggtgtgggagaggctgagctggatgtgccctccattgcctgctactgattctctttattcattgaagatcccctcagagacgtgagaaagctaatggtttaagtaccccatcagaatctccacatttccacttggggtgagtctcatcttcaccctttcaccagctgtcctggtaacaatctcccttccatttccttgttcttacagcataccccatagaatcaagcctcgttattgccagggctgaactgacttttttgttttt

SEQ ID NO: 3528 - DNA, 2001 bp, Homo sapiens
agaggtggaccaggctactccacataaggcatttctcaggctttccttccaagctttatggcatgcttaggcaactttcaaagccatcccctttttaaaaggcaaaaccaacccacaaagctgcaccaacccagtgcactgtgggacagacctacgtgggtagtgcacagtgctgaagcagagcccttggtctgtctgggggtggagagacagaggacaggagctcgctttcaaatccctgtcatcagcccatatggaaagccggtaactctccgaggatacagcctgggcaccctgccaaccactttgtaggaggggggaaccagaggcctagaagcactggtcttttccctagaggacagtaaaagggaggactgaggaatctgtgggctatggttgccctggaaatattgggattatgaccagagtggctctttttttttttttttttaagtctaggaagaatcattcaactaaagaccactttccccaaagtcccagccatcttgagagagacagaggaccaactttttcgctgttcagaattctgtttcaagtgctatcagaaataccagcaaattaaagtacatcccaaccaccactggtttcaaccaaaatatagtcagagataagcctgctgccaaacccacagcctggggcttcctactgagactctcgtaacatcacttccagctctggatccaggaaaatccagattagtaaagtcaaaaccagtgctgaagaccaaaggataaatagccacatatctaagcctctctaaaaccaagagtgccaggagtatcctaattggagtggtcagtggagtgaagaatatggtaaaattagatcaacacaggaattttcccaaggtgcacaatggtactgcttaaaacaaaaacaaaaacaaaaaagtcagttcagccctggcaataacgaggcttgattctatggggtatgctgtaagaacaaggaaatggaagggagattgttaccaggacagctggtgaaagggtgaagatgagactcaccccaagtggaaatgtggagattctgatggggtacttaaaccattagctttctcacgtctctgaggggatcttcaatgaataaagagaatcagtagcaggcaatggagggcacatccagctcagcctctcccacaccaaaacacccaaggctggattcacaccacatcgccagctgccttcccactgtccagacacaaagcccacaccatgaaagaatcttaacaagatggtcctgtttaagccaagacaggcccaggacaaagatccctgggcagctgcagcacggttgcagggggactgtgaatccatagatacccaagcagtctatagacaggtatgcatgttttggacaaatatgtattattttttaaaaggatgaggatgcaaaactcacttaacattactgaattcaaaatggcttttgttcatcacgtgttttctttagtcaaaaggtactaaaaccagaaataatatcacatagaagttctcaaaatttctgacattaaaggggtcttcactcaagtctggatagaatatacttttatttcttcaataggaactaagactcatgaaaaaattaagtcatatattttttaattccttcaaaagtttgtgaggaagaagaaaattccgaagttaatattttgcaatgtgaaataaagttaatttactaccaagaccaaaagaaaaaaaatatttaaatcaagagactcagggtgactgagtttctcagacccagctcaaccctactctagcccagagctcaagggacaaactggagagctcttgctcctacaaaacttagtagaagaatctgccatcccccaaggattccatcgctggattcttacatagctgaggtagtttgccctacatatctaaactttctgctcaaaggtatctagtgatttacaaagcctagcttcagagagtcaatcctttatgaatcaaactgttatttttaccttcggct

SEQ ID NO: 3529 - DNA, 1002 bp, Homo sapiens
aatatgaagtataaacggttccgtccattcttcagatatgatgtaaaattgcatgagaagcaggaagtgtcatcacagctaatatttacatacgctcactatgggccagctcatcctctctgcactcacaaagatgaacttatttggtccttgcctcaactccatgagatgggtactaatgttatgccatttataaatgagaaaacataacgtcacacagctaggtgtggtggtgccagggttcatgcccaggcagtttggtgccagagtcaaagatcttcattactacactatgagtgccttgcctgtgaagaacccagactcaggggagaatttgacccccaggactcaagcccacgagtgagaacacaagcacactccaggctctcacccctcttgtgccctgcccagaggagccatcatacatggcagtgtggctatggggtgagatctgaaaatagttctagcggccctggagttgtatacaactgtactaccagaggctgggttattctgcctgcccctgcttcagcatgagcctctaggcaagagagtcctgttaacttctgctctttcttctctttcctctgctttaaaaatggaagaagagccaggtataagcagaacaccctggcagaactttttacatttggttactgcttgggctacttgctactctgagtagaacgccttcaggggttggcaaactataactggtgggttaaaccctgcccgccacttgcttttataaggttttactggaacatagccacactcgctcatttacatgttgtccatggtctctggaggcttctgtgttccaacagtggcgctcaagagttgtgacagggccataggaatcacaaggcctaaaatatgtattatctggctctttatggaaaaagttttccatgcctgttctaggacgttccaggaacttggagggtgaaaaactgttgtaaagatcaagaagcttgtaatttctcagaaagcaatcaaaca

SEQ ID NO: 3530 - DNA, 22 bp, Homo sapiens
attggtggctgagaactccatt

SEQ ID NO: 3531 - DNA, 22 bp, Homo sapiens
caggaacttggagggtgaaaaa

SEQ ID NO: 3532 - DNA, 731 bp, Homo sapiens
tgtttggaactctgatgtctggctggcctaagctctagctttacattggatttgtgaaaattgaagaagtgtttccatgtttagtactttgagagagctaaatgattggtggctgagaactccattactttcctggaagggtccacttgggcacagagtttttgataaggtctaacttccctgcagctccaaatgtgtgtgtgtgtgtggtggtatagaggctagtttgggggagccctgtctgtccattttctagatcctatccaacccttgtgattcacagtgacaccaggtgaaagcagcaaaacctggggcaggagctcagtcgtcccaaaggaggaaggggaggaggaggagaagagggccccaaagaagaagggacggacgtgggggccagggacgcttggtcagaaggagcttgcctcgggagatgaagggtaagtgccagatgacatgaaattctttctctcttgaagatggatgtaccatttaaacataggatatgaaataactttttttctctgtcgtgtgtttgattgctttctgagaaattacaagcttcttgatctttacaacagtttttcaccctccaagttcctggaacgtcctagaacaggcatggaaaactttttccataaagagccagataatacatattttaggccttgtgattcctatggccctgtcacaactcttgagcgccactgttggaacacagaagcctccagaga

SEQ ID NO: 3533 - DNA, 2001 bp, Homo sapiens
gccagctcatcctctctgcactcacaaagatgaacttatttggtccttgcctcaactccatgagatgggtactaatgttatgccatttataaatgagaaaacataacgtcacacagctaggtgtggtggtgccagggttcatgcccaggcagtttggtgccagagtcaaagatcttcattactacactatgagtgccttgcctgtgaagaacccagactcaggggagaatttgacccccaggactcaagcccacgagtgagaacacaagcacactccaggctctcacccctcttgtgccctgcccagaggagccatcatacatggcagtgtggctatggggtgagatctgaaaatagttctagcggccctggagttgtatacaactgtactaccagggctgggttattctgcctgcccctgcttcagcatgagcctctaggcaagagagtcctgttaacttctgctctttcttctctttcctctgctttaaaaatggaagaagagccaggtataagcagaacaccctggcagaactttttacatttggttactgcttgggctacttgctactctgagtagaacgccttcaggggttggcaaactataactggtgggttaaaccctgcccgccacttgcttttataaggttttactggaacatagccacactcgctcatttacatgttgtccatggtctctggaggcttctgtgttccaacagtggcgctcaagagttgtgacagggccataggaatcacaaggcctaaaatatgtattatctggctctttatggaaaaagttttccatgcctgttctaggacgttccaggaacttggagggtgaaaaactgttgtaaagatcaagaagcttgtaatttctcagaaagcaatcaaacacacgacagagaaaaaaagttatttcatatcctatgtttaaatggtacatccatcttcaagagagaaagaatttcatgtcatctggcacttacccttcatctcccgaggcaagctccttctgaccaagcgtccctggcccccacgtccgtcccttcttctttggggccctcttctcctcctcctccccttcctcctttgggacgactgagctcctgccccaggttttgctgctttcacctggtgtcactgtgaatcacaagggttggataggatctagaaaatggacagacagggctcccccaaactagcctctataccaccacacacacacacacatttggagctgcagggaagttagaccttatcaaaaactctgtgcccaagtggacccttccaggaaagtaatggagttctcagccaccaatcatttagctctctcaaagtactaaacatggaaacacttcttcaattttcacaaatccaatgtaaagctagagcttaggccagccagacatcagagttccaaacagatctgactttacctgttttgttgggtgggattgggtagtgagcaaataaggaggcaggtaaggggggaaaaaagacaaggggtaaggaaggcgtggaaatgcaggaatcttggaaagaaagggttgggaagaaaatgaggagttcaaggttatggaaaaggaagtctggagtgggagaaggggaagaaagaggcctagagaaagacagataagagaggaggaatatttttctgacattaataccttggagcaagggttgagacccaaatgccccagggactgtgcttatatcataaacgagcaaactagttaccaaaaaacaaggagttgaaggggctgaggcaaaatatggagtatacggaagctgctattagtgccagccaactgtagccacatgaaaaaagaaacctactgatttgatttcatttttcaaggaaagctagaaatcttggatttttcttttttgagacggagtctcactctgtcgcccatgctggaacgcagtggcgcaatcttggctcactgcaacctccgcctcctgcattcaagcgattctcttgcctcagtctcccaa

SEQ ID NO: 3534 - DNA, 22 bp, Homo sapiens
gaatcacaagggttggatagga

SEQ ID NO: 3535 - DNA, 20 bp, Homo sapiens
tccacttgggcacagagttt

SEQ ID NO: 3536 - DNA, 138 bp, Homo sapiens
gaatcacaagggttggataggatctagaaaatggacagacagggctcccccaaactagcctctataccaccacacacacacacacatttggagctgcagggaagttagaccttatcaaaaactctgtgcccaagtgga

SEQ ID NO: 3537 - DNA, 2001 bp, Homo sapiens
agtcaaagatcttcattactacactatgagtgccttgcctgtgaagaacccagactcaggggagaatttgacccccaggactcaagcccacgagtgagaacacaagcacactccaggctctcacccctcttgtgccctgcccagaggagccatcatacatggcagtgtggctatggggtgagatctgaaaatagttctagcggccctggagttgtatacaactgtactaccagggctgggttattctgcctgcccctgcttcagcatgagcctctaggcaagagagtcctgttaacttctgctctttcttctctttcctctgctttaaaaatggaagaagagccaggtataagcagaacaccctggcagaactttttacatttggttactgcttgggctacttgctactctgagtagaacgccttcaggggttggcaaactataactggtgggttaaaccctgcccgccacttgcttttataaggttttactggaacatagccacactcgctcatttacatgttgtccatggtctctggaggcttctgtgttccaacagtggcgctcaagagttgtgacagggccataggaatcacaaggcctaaaatatgtattatctggctctttatggaaaaagttttccatgcctgttctaggacgttccaggaacttggagggtgaaaaactgttgtaaagatcaagaagcttgtaatttctcagaaagcaatcaaacacacgacagagaaaaaaagttatttcatatcctatgtttaaatggtacatccatcttcaagagagaaagaatttcatgtcatctggcacttacccttcatctcccgaggcaagctccttctgaccaagcgtccctggcccccacgtccgtcccttcttctttggggccctcttctcctcctcctccccttcctcctttgggacgactgagctcctgccccaggttttgctgctttcacctggtgtcactgtgaatcacaagggttggataggatctagaaaatggacagacagggctcccccaaactagcctctataccaccacacacacacacacatttggagctgcagggaagttagaccttatcaaaaactctgtgcccaagtggacccttccaggaaagtaatggagttctcagccaccaatcatttagctctctcaaagtactaaacatggaaacacttcttcaattttcacaaatccaatgtaaagctagagcttaggccagccagacatcagagttccaaacagatctgactttacctgttttgttgggtgggattgggtagtgagcaaataaggaggcaggtaaggggggaaaaaagacaaggggtaaggaaggcgtggaaatgcaggaatcttggaaagaaagggttgggaagaaaatgaggagttcaaggttatggaaaaggaagtctggagtgggagaaggggaagaaagaggcctagagaaagacagataagagaggaggaatatttttctgacattaataccttggagcaagggttgagacccaaatgccccagggactgtgcttatatcataaacgagcaaactagttaccaaaaaacaaggagttgaaggggctgaggcaaaatatggagtatacggaagctgctattagtgccagccaactgtagccacatgaaaaaagaaacctactgatttgatttcatttttcaaggaaagctagaaatcttggatttttcttttttgagacggagtctcactctgtcgcccatgctggaacgcagtggcgcaatcttggctcactgcaacctccgcctcctgcattcaagcgattctcttgcctcagtctcccaagtagctcggactacagatgggtgccaccatgcccagctaacttttttgtatttttagtagaggcggggtttcagcatgttggccaggatggtctcgatctcctgacctcatgatctgcccgcctcagcctcccagagtgctgggattacaggcataagccacc

SEQ ID NO: 3538 - DNA, 18 bp, Homo sapiens
cccagccgaaatcttgga

SEQ ID NO: 3539 - DNA, 20 bp, Homo sapiens
cacttcccaaggaagggttt

SEQ ID NO: 3540 - DNA, 244 bp, Homo sapiens
cccagccgaaatcttggatttttaaataaaatctgtctttaaaccagggaaactaattcattcacatataggtgtatgttcacacacacacacacacacacacacttacatgtatgtgtgagtattttttttaagcaaatactgtagcaaagataaaattggtccagatttggcttattataaagtatatggcaagtttccttaggacctatactttgaaaaaaaaacccttccttgggaagtg

SEQ ID NO: 3541 - DNA, 23 bp, Homo sapiens
ccagggaaactaattcattcaca

SEQ ID NO: 3542 - DNA, 26 bp, Homo sapiens
tcctaaggaaacttgccatatacttt

SEQ ID NO: 3543 - DNA, 164 bp, Homo sapiens
ccagggaaactaattcattcacatataggtgtatgttcacacacacacacacacacacacacttacatgtatgtgtgagtattttttttaagcaaatactgtagcaaagataaaattggtccagatttggcttattataaagtatatggcaagtttccttagga

SEQ ID NO: 3544 - DNA, 22 bp, Homo sapiens
atttcccaggtgaacaaagagc

SEQ ID NO: 3545 - DNA, 22 bp, Homo sapiens
cccacaaatccctttgctgata

SEQ ID NO: 3546 - DNA, 657 bp, Homo sapiens
attcattatatagacagctttatgaagctcacagatgaagttcacttgcacagtgaattttccatctttttatacgttcatctccccatgtcccttgggaaaaagagatgattctaaaagagaacatttcccaggtgaacaaagagcttttcaggaaactggggcctgtccctcaaggatgctgaggaatgtcatatttcttatatgaatttaattatgggaaatgttaatgcatacacgtgtttgtctttccccaagcagatttccagcacaagttcacggtgcaggcctcccctaccatggataaaaggaagagtcttatcaacagccgctccagtcctcctgcaagccccaccatcattcctcgccttcgagccatccagtgtgagactgtttcccaaattagctggggccagaacacacaggggcacctgtcccctgctctgtccagccaccgactggtccaggcttgctccatccataacttctgccacctctcctcgacaatgtgtatatacatgcacatatgtacgcaaacccttagccctctcccttgtctctctccattaactttactactgccccctctaccttttagtcacatatcagcaaagggatttgtgggtactaatgggatctttagtggtttgcaaagca

SEQ ID NO: 3547 - DNA, 801 bp, Homo sapiens
ggacagagcaggggacaggtgcccctgtgtgttctggccccagctaatttgggaaacagtctcacactggatggctcgaaggcgaggaatgatggtggggcttgcaggaggactggagcggctgttgataagactcttccttttatccatggtaggggaggcctgcaccgtgaacttgtgctggaaatctgcttggggaaagacaaacacgtgtatgcattaacatttcccataattaaattcatataagaaatatgacattcctcagcatccttgagggacaggccccagtttcctgaaaagctctttgttcacctgggaaatgttctcttttagaatcatctctttttcccaagggacatggggagatgaacgtataaaaagatggaaaattcactgtacaagtgaacttcatctgtgagcttcataaagctgtctatataatgaatatagttcaagcagttatgtattaagaatagctgtttagctcatgagatgttgttgattattctaggaaatttaacttaaaattattggtttcacataatctattatcagatagatttggtcctcttttctcagggactgaagcagggacactgattcttctcactaagtgcaggcacagcagggtatcaatgactagcccttgtgggaacctagggcagtgagggagatggagcaaatggctccaattcggacacattccaaaggaagttacagtacagcataaagaatgtaaaacttacaggtctgaatttctgagtttcagtctcctcatctatcaaagaggtaaaataa

SEQ ID NO: 3548 - DNA, 22 bp, Homo sapiens
agctctccaggtcaccataagc

SEQ ID NO: 3549 - DNA, 22 bp, Homo sapiens
atgccagtctttccagtgaaca

SEQ ID NO: 3550 - DNA, 510 bp, Homo sapiens
agctctccaggtcaccataagccctctgggagctctcaggcctcaccccagagcccctctgcactgagcaccccagtcttttctctgatggttctgcccatcctgcaggaacttcgcacctgggaggaggagctgacgcgggctgcactgcagcagaagaaccaggaggaactgctgcggcgtcgggagcaggagctggccgagcgggagattgacatcctggaacgggagctcaacatcatcatccaccagctgtgccaggagaagccccgggtgaagaaacgcaagggcaagttcaggaagagccggctgaagctcaaggatggcaaccgcatcagcctcccttctggtcagtggccggggactggctgggaagtgggagcagggcaaagaactcgtgtggcagagggtttgagggagtccgggactgagcttggaaacatgacaccctggggctcaaactccagcctgttttaaatgggccattctgttcactggaaagactggcat

SEQ ID NO: 3551 - DNA, 22 bp, Homo sapiens
agctctccaggtcaccataagc

SEQ ID NO: 3552 - DNA, 22 bp, Homo sapiens
atgccagtctttccagtgaaca

SEQ ID NO: 3553 - DNA, 1679 bp, Homo sapiens
aaaaaatttggcttgtcgcagtgactcacgcctgttatcctagcactttgagaggctgaggccgatggatcacttgatgccaggagtttgagaccagcctggccaacatggtaaaacctaatctctactaaaatacaaaaaaattagctaggtttggtggcacatgcctataatctcagctactccggtggctgagacatgaaaatcacttgaatcagggatgcagaggttgcagtgggctgagatcgcaccgctgcactccaacgtgggtgacagaatgagttgctgtctcaaaaaatagaaagtaaagtacaaccaagtctgtaaataaatacatgattatattttctattcaaacctatatatatatatatatatatatataaatatatataaatcacaggcaattttaatgaagaaggaaggagcgactagaaactcttagcccccatttctagggcttgacctatggctttatcttctctgactgtcccgtcagtatggctgttctgagccttcctttccccaccattcaaggtggtctaatgttcatttaccagctatcgagtcctctctcttcactgagcatcataggagagctctccaggtcaccataagccctctgggagctctcaggcctcaccccagagcccctctgcactgagcaccccagtcttttctctgatggttctgcccatcctgcaggaacttcgcacctgggaggaggagctgacgcgggctgcactgcagcagaagaaccaggaggaactgctgcggcgtcgggagcaggagctggccgagcgggagattgacatcctggaacgggagctcaacatcatcatccaccagctgtgccaggagaagccccgggtgaagaaacgcaagggcaagttcaggaagagccggctgaagctcaaggatggcaaccgcatcagcctcccttctggtcagtggccggggactggctgggaagtgggagcagggcaaagaactcgtgtggcagagggtttgagggagyccgggactgagcttggaaacatgacaccctggggctcaaactccagcctgttttaaatgggccattctgttcactggaaagactggcatgttgaaaatctaccctactccagggaaattgttgcatgtgagtgaacacagaatatgaagtgaggacaacccggcaaggtccaggctgctagaagcctggtggctcacaggggcacatctcactttaggcaaacctggagaaggaagcatgaagttgggggaaaacattccagggtgtgcatgtgtgagacacgagaagttttggctctgcaaaataacttgtctcaaggtttcttttttttgagacagagttttgcttttgttgcccaggctggagtgcaatgacaagatcttggctcactgcaacctccacctccccggttcaagtgattctgctgccccaggcccccgagcagctgggattacaggcgcatgccaccacgcccagctgatttttgtatttttagtagagacagggtttcaccctcaagtgatccacccaccttggcctcccaaagtgctgggattacagttgtgagccaccactcctggctgacgtttttttaattagtcccctgagtgcagttgagactgggtttaatgtatgagaatttacatgataagatttacat

SEQ ID NO: 3554 - DNA, 22 bp, Homo sapiens
agctctccaggtcaccataagc

SEQ ID NO: 3555 - DNA, 22 bp, Homo sapiens
atgccagtctttccagtgaaca

SEQ ID NO: 3556 - DNA, 1865 bp, Homo sapiens
aacatggtaaaacctaatctctactaaaatacaaaaaaattagctaggtttggtggcacatgcctataatctcagctactccggtggctgagacatgaaaatcacttgaatcagggatgcagaggttgcagtgggctgagatcgcaccgctgcactccaacgtgggtgacagaatgagttgctgtctcaaaaaatagaaagtaaagtacaaccaagtctgtaaataaatacatgattatattttctattcaaacctatatatatatatatatatatatataaatatatataaatcacaggcaattttaatgaagaaggaaggagcgactagaaactcttagcccccatttctagggcttgacctatggctttatcttctctgactgtcccgtcagtatggctgttctgagccttcctttccccaccattcaaggtggtctaatgttcatttaccagctatcgagtcctctctcttcactgagcatcataggagagctctccaggtcaccataagccctctgggagctctcaggcctcaccccagagcccctctgcactgagcaccccagtcttttctctgatggttctgcccatcctgcaggaacttcgcacctgggaggaggagctgacgcgggctgcactgcagcagaagaaccaggaggaactgctgcggcgtcgggagcaggagctggccgagcgggagattgacatcctggaacgggagctcaacatcatcatccaccagctgtgccaggagaagccccgggtgaagaaacgcaagggcaagttcaggaagagccggctgaagctcaaggatggcaaccgcatcagcctcccttctggtcagtggccggggactggctgggaagtgggagcagggcaaakaactcgtgtggcagagggtttgagggagtccgggactgagcttggaaacatgacaccctggggctcaaactccagcctgttttaaatgggccattctgttcactggaaagactggcatgttgaaaatctaccctactccagggaaattgttgcatgtgagtgaacacagaatatgaagtgaggacaacccggcaaggtccaggctgctagaagcctggtggctcacaggggcacatctcactttaggcaaacctggagaaggaagcatgaagttgggggaaaacattccagggtgtgcatgtgtgagacacgagaagttttggctctgcaaaataacttgtctcaaggtttcttttttttgagacagagttttgcttttgttgcccaggctggagtgcaatgacaagatcttggctcactgcaacctccacctccccggttcaagtgattctgctgccccaggcccccgagcagctgggattacaggcgcatgccaccacgcccagctgatttttgtatttttagtagagacagggtttcaccctcaagtgatccacccaccttggcctcccaaagtgctgggattacagttgtgagccaccactcctggctgacgtttttttaattagtcccctgagtgcagttgagactgggtttaatgtatgagaatttacatgataagatttacatgtgacctttcagacacacacatcagttgaataaacatgcatttgttgtactgcagccttggggaaaatataaagaaatatgaaactattaattagaatctttgtggtgtgtaatatatccatggagggagccgaatgctaaaatgtgtgttgatgtagataaagatattcactgtgttctaagtctatgaggccctagaaagcaggcttattagaagtgtaaggaacaggccaggtgcaatggctcatgcctataatcccagcactttgggaggccgaggcgggtggatc

SEQ ID NO: 3557 - DNA, 2001 bp, Homo sapiens
gctgcagtacaacaaatgcatgtttattcaactgatgtgtgtgtctgaaaggtcacatgtaaatcttatcatgtaaattctcatacattaaacccagtctcaactgcactcaggggactaattaaaaaaacgtcagccaggagtggtggctcacaactgtaatcccagcactttgggaggccaaggtgggtggatcacttgagggtgaaaccctgtctctactaaaaatacaaaaatcagctgggcgtggtggcatgcgcctgtaatcccagctgctcgggggcctggggcagcagaatcacttgaaccggggaggtggaggttgcagtgagccaagatcttgtcattgcactccagcctgggcaacaaaagcaaaactctgtctcaaaaaaaagaaaccttgagacaagttattttgcagagccaaaacttctcgtgtctcacacatgcacaccctggaatgttttcccccaacttcatgcttccttctccaggtttgcctaaagtgagatgtgcccctgtgagccaccaggcttctagcagcctggaccttgccgggttgtcctcacttcatattctgtgttcactcacatgcaacaatttccctggagtagggtagattttcaacatgccagtctttccagtgaacagaatggcccatttaaaacaggctggagtttgagccccagggtgtcatgtttccaagctcagtcccggactccctcaaaccctctgccacacgagttctttgccctgctcccacttcccagccagtccccggccactgaccagaagggaggctgatgcggttgccatccttgagcttcagccggctcttcctgaacttgcccttgcgtttcttcacccggggcttctcctggcacagctggtggatgatgatgttgagctcccgttccaggatgtcaatctcccgctcggccagctcctgctcccgacgccgcagcagttcctcctggttcttctgctgcagtgcagcccgcgtcagctcctcctcccaggtgcgaagttcctgcaggatgggcagaaccatcagagaaaagactggggtgctcagtgcagaggggctctggggtgaggcctgagagctcccagagggcttatggtgacctggagagctctcctatgatgctcagtgaagagagaggactcgatagctggtaaatgaacattagaccaccttgaatggtggggaaaggaaggctcagaacagccatactgacgggacagtcagagaagataaagccataggtcaagccctagaaatgggggctaagagtttctagtcgctccttccttcttcattaaaattgcctgtgatttatatatatttatatatatatatatatatatatataggtttgaatagaaaatataatcatgtatttatttacagacttggttgtactttactttctattttttgagacagcaactcattctgtcacccacgttggagtgcagcggtgcgatctcagcccactgcaacctctgcatccctgattcaagtgattttcatgtctcagccaccggagtagctgagattataggcatgtgccaccaaacctagctaatttttttgtattttagtagagattaggttttaccatgttggccaggctggtctcaaactcctggcatcaagtgatccatcggcctcagcctctcaaagtgctaggataacaggcgtgagtcactgcgacaagccaaattttttctattatataaaagatgttttttcaccaaatgcaatggcaacaaaagccaaaattaacaaatgggatctaattaaactaaagagcttctgcacagcaaaagaaactatcatcagagtgaataggcaacctacagaatgggagaaaactttgcaatctatccatctgacaaagggctaatatccagaatctacaaagaacttaaacaaatttacaagaaaaaaaaaaaccccatcaaaaagtgggtgaaggatatgaacagacactt

SEQ ID NO: 3558 - DNA, 20 bp, Homo sapiens
ccctagaaatgggggctaag

SEQ ID NO: 3559 - DNA, 20 bp, Homo sapiens
aatcagggatgcagaggttg

SEQ ID NO: 3560 - DNA, 248 bp, Homo sapiens
ccctagaaatgggggctaagagtttctagtcgctccttccttcttcattaaaattgcctgtgatttatatatatttatatatatatatatatatatatataggtttgaatagaaaatataatcatgtatttatttacagacttggttgtactttactttctattttttgagacagcaactcattctgtcacccacgttggagtgcagcggtgcgatctcagcccactgcaacctctgcatccctgatt

SEQ ID NO: 3561 - DNA, 801 bp, Homo sapiens
cactgcactccggcctaggtgacagagcaagactctgtctcaaaaaaaaaaaaagtgatagaaaagaaatgagaaaagaattagcacattgaaaagtgtctagcatgtggtaggcctaggtactcagtggttgaataactattgagtcaataaatgaatgaagagaaataataataggagatagagtgcaatattgtgaatgcaatccttctttatgggaacatagatttatcacaagttcctgagagttgaacttgaactacttcttccttgatgaaataaacctcaaattaattgttgtgcgccctccaaatcctttgtttctctgtcctatgactttgttttcattaccaagagaagaaaaattcatggaagatgcagaaaaaatattcctggttggctgattttgctgttaagtgtaaaagtttaaaaatcaaagctaatttcaagcttcctaagccctcgtctcctccatgctcttgtctaagggatggtctggctctaagtcactctctttaatggaacacaaaccccagatgacaccaatgcattctcacaataatacttagaaacagtaggttgatccaacctgaggaattagctgaatcatagggtaaatgaggaaacttgtggaatatatgcctatgacaccattcacctggaggacccttagacatgttgaatctcctacttttgcaacacctatttgtgttgcacagtttgcaaatcacatcttccacatacagaatgagttaagaagaatctctccagagagaaagcacatcttactctcacttacca

SEQ ID NO: 3562 - DNA, 2001 bp, Homo sapiens
aatattacaacgaatatcggtttttggaatcagaagacccacattcaagattctgcttccccacttactaactctgttacttcaggcaagttgctgaccctcagctctgagatggaaacaataataacacctggcctacatactgatggcaggagccataggactcctggataaaacagacaaaaaggtctcatcaaatttttcaagtggaaaaagtgggaaaccataaagccataaacaattttagctatcattattatcacatggctattaacttcccaaattcccatagtgcagagtgagaaaagaaaaaaggcctgtaatcccagccctttgggaggccgaggtgggcggatcacgaggtcaggagatcgagagcattctggctaacacggtgaaaccccatctcaactaaaaatacaagaaattagccgggcgaggtggcgggcgcctgtagtcccagctactcgggaggctgaggcaggagaatggcgtgaacccagaggcagagcctgcagtgagctgagatcgtgccactgcacttcagcctgggcgacagagcgagactgtctcaaaaaaaaaaaaaaaatggtaaaagaaattaaccaaatctataaagacttctctcttgcccctagctacatcccttagatttagtcctgcccctatataagcaatatagttgcatgtgactggcttcacctgtgtgtacactgactgctagggacacactgagggaacagaaaggggccatttagggaatggccaccaaaacaaaaaagcagatctctggtaggctaggagtctctgaactccctggttggtttgggcttgaaatacttttcataaaaacatgaaaaatgccacacaatttcagacccatgttattttttgcccatattctatttctgattctgatgtcaaaagacatgggaaggatgttctgataactatcctcaaggttgaagtatccctatatcaaattaaccttcttctagaaatctattgtagaatcaagaaacatttccagaacttctcatatttccagctggcagggtgagacattccactgtgagaaaagaaaaaaggcctgtaatccaagcactgggattttgcccaactgcattcttctctggtttggacaattaagtagataccaagctggaaggtgggcatgctagaatcaagatggtcagtcagactcggtccagaggtccctgtgagtgaggtctaccaattcaatgcatgccttttttcttttcgttcgtttttttgttgttttttttgttttgtttaccttttctttggccctgagttggtcaaacatctcctgaatctcgtgtttccagttgtcctgcaggcagtggaaggagtccttgggcatttcaaagaaaccagactcctctatggtggttagctggtccaggatattcgtgaaagatggtcgtgagtggggatcaggattccagcagtctgaatagaacatgtgaatactcagaaagcatgaatggacagaagcaaacatgtaagacttaggctattacatggcctcacttcccagaaaactacctcttacttcttccagaaacagagatcagaatttaggtaacctcaaataaggctcaggaagtaaagcaaactgtccaccattacaaccataaagagtgaaaatggaaatgaaatgcagcagttctgtactcattccattctggctgttaattaaggataagaaaagcgagcccaaagagttttcttgtacaaagcaccaccacaacacaatttaccatgttactacctgattcaagaacagacaatggggaattatgccctgggcttcagtttcccataaataaatgaattagccttcccccacccacaatgggatgatgaggaggcgaggatgaaaagcattctagtgggagtcagggaaatcgaattctacctaatcccagctcagccactctctaatgaggtggccacctatccactcaacttcgctta

SEQ ID NO: 3563 - DNA, 22 bp, Homo sapiens
tgggaagtgaggccatgtaata

SEQ ID NO: 3564 - DNA, 22 bp, Homo sapiens
gggtgagacattccactgtgag

SEQ ID NO: 3565 - DNA, 506 bp, Homo sapiens
tgggaagtgaggccatgtaatagcctaagtcttacatgtttgcttctgtccattcatgctttctgagtattcacatgttctattcagactgctggaatcctgatccccactcacgaccatctttcacgaatatcctggaccagctaaccaccatagaggagtctggtttctttgaaatgcccaaggactccttccactgcctgcaggacaactggaaacacgagattcaggagatgtttgaccaactcagggccaaagaaaaggtaaacaaaacaaaaaaaacaacaaaaaaacgaacgaaaagaaaaaaggcatgcattgaattggtagacctcactcacagggacctctggaccgagtctgactgaccatcttgattctagcatgcccaccttccagcttggtatctacttaattgtccaaaccagagaagaatgcagttgggcaaaatcccagtgcttggattacaggccttttttcttttctcacagtggaatgtctcaccc

SEQ ID NO: 3566 - DNA, 22 bp, Homo sapiens
tgggaagtgaggccatgtaata

SEQ ID NO: 3567 - DNA, 22 bp, Homo sapiens
gggtgagacattccactgtgag

SEQ ID NO: 3568 - DNA, 1357 bp, Homo sapiens
aggtagaattcgatttccctgactcccactagaatgcttttcatcctcgcctcctcatcatcccattgtgggtgggggaaggctaattcatttatttatgggaaactgaagcccagggcataattccccattgtctgttcttgaatcaggtagtaacatggtaaattgtgttgtggtggtgctttgtacaagaaaactctttgggctcgcttttcttatccttaattaacagccagaatggaatgagtacagaactgctgcatttcatttccattttcactctttatggttgtaatggtggacagtttgctttacttcctgagccttatttgaggttacctaaattctgatctctgtttctggaagaagtaagaggtagttttctgggaagtgaggccatgtaatagcctaagtcttacatgtttgcttctgtccattcatgctttctgagtattcacatgttctattcagactgctggaatcctgatccccactcacgaccatctttcacgaatatcctggaccagctaaccaccatagaggagtctggtttctttgaaatgcccaaggactccttccactgcctgcaggacaactggaaacacgagattcaggagatgtttgaccaactcagggccaaagaaaaggtaaacaaaacaaaaaaaacaacaaaaaaacgaacgaaaagaaaaaaggcatgcattgaattggtagacctcactcacagggacctctggaccgagtctgactgaccatcttgattctagcatgcccaccttccagcttggtatctacttaattgtccaaaccagmgaagaatgcagttgggcaaaatcccagtgcttggattacaggccttttttcttttctcacagtggaatgtctcaccctgccagctggaaatatgagaagttctggaaatgtttcttgattctacaatagacttctagaagaaggttaatttgatatagggatacttcaaccttgaggatagttatcagaacatccttcccatgtcttttgacatcagaatcagaaatagaatatgggcaaaaaataacatgggtctgaaattgtgtggcatttttcatgtttttatgaaaagtatttcaagcccaaaccaaccagggagttcagagactcctagcctaccagagatctgcttttttgttttggtggccattccctaaatggcccctttctgttccctcagtgtgtccctagcagtcagtgtacacacaggtgaagccagtcacatgcaactatattgcttatataggggcaggactaaatctaagggatgtagctaggggcaagagagaagtctttatagatttggttaatttcttttaccatt

SEQ ID NO: 3569 - DNA, 2001 bp, Homo sapiens
atggcaggagccataggactcctggataaaacagacaaaaaggtctcatcaaatttttcaagtggaaaaagtgggaaaccataaagccataaacaattttagctatcattattatcacatggctattaacttcccaaattcccatagtgcagagtgagaaaagaaaaaaggcctgtaatcccagccctttgggaggccgaggtgggcggatcacgaggtcaggagatcgagagcattctggctaacacggtgaaaccccatctcaactaaaaatacaagaaattagccgggcgaggtggcgggcgcctgtagtcccagctactcgggaggctgaggcaggagaatggcgtgaacccagaggcagagcctgcagtgagctgagatcgtgccactgcacttcagcctgggcgacagagcgagactgtctcaaaaaaaaaaaaaaaatggtaaaagaaattaaccaaatctataaagacttctctcttgcccctagctacatcccttagatttagtcctgcccctatataagcaatatagttgcatgtgactggcttcacctgtgtgtacactgactgctagggacacactgagggaacagaaaggggccatttagggaatggccaccaaaacaaaaaagcagatctctggtaggctaggagtctctgaactccctggttggtttgggcttgaaatacttttcataaaaacatgaaaaatgccacacaatttcagacccatgttattttttgcccatattctatttctgattctgatgtcaaaagacatgggaaggatgttctgataactatcctcaaggttgaagtatccctatatcaaattaaccttcttctagaagtctattgtagaatcaagaaacatttccagaacttctcatatttccagctggcagggtgagacattccactgtgagaaaagaaaaaaggcctgtaatccaagcactgggattttgcccaactgcattcttctctggtttggacaagtaagtagataccaagctggaaggtgggcatgctagaatcaagatggtcagtcagactcggtccagaggtccctgtgagtgaggtctaccaattcaatgcatgccttttttcttttcgttcgtttttttgttgttttttttgttttgtttaccttttctttggccctgagttggtcaaacatctcctgaatctcgtgtttccagttgtcctgcaggcagtggaaggagtccttgggcatttcaaagaaaccagactcctctatggtggttagctggtccaggatattcgtgaaagatggtcgtgagtggggatcaggattccagcagtctgaatagaacatgtgaatactcagaaagcatgaatggacagaagcaaacatgtaagacttaggctattacatggcctcacttcccagaaaactacctcttacttcttccagaaacagagatcagaatttaggtaacctcaaataaggctcaggaagtaaagcaaactgtccaccattacaaccataaagagtgaaaatggaaatgaaatgcagcagttctgtactcattccattctggctgttaattaaggataagaaaagcgagcccaaagagttttcttgtacaaagcaccaccacaacacaatttaccatgttactacctgattcaagaacagacaatggggaattatgccctgggcttcagtttcccataaataaatgaattagccttcccccacccacaatgggatgatgaggaggcgaggatgaaaagcattctagtgggagtcagggaaatcgaattctacctaatcccagctcagccactctctaatgaggtggccacctatccactcaacttcgcttagctttagattccttacttacaaaattatggggtttgactagatgacttttagagttctttctcctaagatgttcttcacgtctcttaaggtattcagaggtcctgacataaaagttgctgtactttctgattttgcattaaatga

SEQ ID NO: 3570 - DNA, 22 bp, Homo sapiens
tgggaagtgaggccatgtaata

SEQ ID NO: 3571 - DNA, 22 bp, Homo sapiens
gggtgagacattccactgtgag

SEQ ID NO: 3572 - DNA, 1459 bp, Homo sapiens
agtcatctagtcaaaccccataattttgtaagtaaggaatctaaagctaagcgaagttgagtggataggtggccacctcattagagagtggctgagctgggattaggtagaattcgatttccctgactcccactagaatgcttttcatcctcgcctcctcatcatcccattgtgggtgggggaaggctaattcatttatttatgggaaactgaagcccagggcataattccccattgtctgttcttgaatcaggtagtaacatggtaaattgtgttgtggtggtgctttgtacaagaaaactctttgggctcgcttttcttatccttaattaacagccagaatggaatgagtacagaactgctgcatttcatttccattttcactctttatggttgtaatggtggacagtttgctttacttcctgagccttatttgaggttacctaaattctgatctctgtttctggaagaagtaagaggtagttttctgggaagtgaggccatgtaatagcctaagtcttacatgtttgcttctgtccattcatgctttctgagtattcacatgttytattcagactgctggaatcctgatccccactcacgaccatctttcacgaatatcctggaccagctaaccaccatagaggagtctggtttctttgaaatgcccaaggactccttccactgcctgcaggacaactggaaacacgagattcaggagatgtttgaccaactcagggccaaagaaaaggtaaacaaaacaaaaaaaacaacaaaaaaacgaacgaaaagaaaaaaggcatgcattgaattggtagacctcactcacagggacctctggaccgagtctgactgaccatcttgattctagcatgcccaccttccagcttggtatctacttaattgtccaaaccagagaagaatgcagttgggcaaaatcccagtgcttggattacaggccttttttcttttctcacagtggaatgtctcaccctgccagctggaaatatgagaagttctggaaatgtttcttgattctacaatagacttctagaagaaggttaatttgatatagggatacttcaaccttgaggatagttatcagaacatccttcccatgtcttttgacatcagaatcagaaatagaatatgggcaaaaaataacatgggtctgaaattgtgtggcatttttcatgtttttatgaaaagtatttcaagcccaaaccaaccagggagttcagagactcctagcctaccagagatctgcttttttgttttggtggccattccctaaatggcccctttctgttccctcagtgtgtccctagcagtcagtgtacacacaggtgaagccagtcacatgcaactatattgcttatataggggcaggactaaatctaagggatgtagctaggggcaagagagaagtctttatagatttggttaatttcttttacca

SEQ ID NO: 3573 - DNA, 22 bp, Homo sapiens
tgcttgactccagagattttgc

SEQ ID NO: 3574 - DNA, 22 bp, Homo sapiens
ttgaagaagcctttccagttgc

SEQ ID NO: 3575 - DNA, 639 bp, Homo sapiens
aggtcatatagctaaggaattatgggagaaaacttgaaaaccaagtatgcttgactccagagattttgcttttagctagtaggctttatggtttcccttttatatcacattagtatttctgtttcattagtctcactatctgttggggagaatgtgggatgctcagaaaagactcgagctattgcagtgaagttgtacctgaagtttattacatggcttctgtcttcttcctctccttagctatggggtgctactttgggagttgctgactggtgaggtgccctttcgaggcattgatggcttagcagtcgcttatggagtggccatgaacaaactcgcccttcctattccttctacgtgcccagaaccttttgccaaactcatggaaggtaagtaagccctggcctgaaccaaactggagacactttgcctcttgtaagcactgggtagagtttggccaattctgtgagatcagttactgaaagaggagataaagtttcagtcacctaaggaggaatcctctgggcaactggaaaggcttcttcaagatgacatccacaccctgctgcaagcagtcatatctccagggactgtagaagtgaaattagtaacaaaagcctgctatccggcacttcagca

SEQ ID NO: 3576 - DNA, 20 bp, Homo sapiens
ccaatggccatagctctttc

SEQ ID NO: 3577 - DNA, 20 bp, Homo sapiens
ctcttgaacccaggagatgg

SEQ ID NO: 3578 - DNA, 146 bp, Homo sapiens
ccaatggccatagctctttcactatcattattgttttttgtttgtttgtttgtttgttttgggatggagtttcgctcggttgctcaggctggagtgcagtggcgtgatctcggctcactgcaacctccatctcctgggttcaagag

SEQ ID NO: 3579 - DNA, 2001 bp, Homo sapiens
cagatcacttgaggtcaggagttcaagaccagcctggccaacatggtggaactccatctctactaaaaatacaaaaattagccaggtgtggtggtgcatgcctgtaatcccagctacttgggaggctgaggcaggatgatcacttgaatctaggaggcgaaggttgcagtaagccaagatcacgccactgcactctagcctgggtgacagagcaagactctgtctcaaagtaatcaataataataataaacccagtagctatttatcatgaaaccttatatatgaagaccactaagacactttacaaacatcactgtgaatctctacaacaattctgataggtattatcaacattttgcacacaaggaaagcaagttttagacatgtttaggagcatattactaagggcatacacagagtacatcatggtgggcccagaccagttctcaatttattccccctagaatgccttctaccatttctttgcttggtaaatgctaatcatctttcaagatccaactcaaatgtcccaccatttattcattcatcagatgacggctttaccccagtgaggccttcaaatactatcattttctttatgcatcttgccaggaaaaaacaaaaagcctggtagccagttggtcttgactcgtctagacaggagatggattttagtttggaggcttatgggaatagcattggatactttacgatgccttcttgacatccccagatgttactcagcccatttgggctgccatgtattgtagctgtttgtctgctagcctataggctcctaaagagcagggagaaatgtttttaatctttgcattctcaggacctagcccaagctctggtacacaggaagcactcatagatatgtgagtgagtgggtctgtgggtatgggagtgagcgcatggtcagacagtcctgcaggctgccctgggtcctctagaggaaaacccaaacatcatcaagaattgcactattacacttcctaacaaacctttcatgtgacttatccaggtagtggtcatgctggggagcttctaccaagtgacctccaggaactctcagcattgccaaccagattcctaggtcaaagccactgttatcctccattgcttgctcttggaataaatgcccacctccatcctggagaataaaaaccaaaggtcccacagaacccctttctcccaaccagacaaagacagacggtatctgggccctaactacctggaaagatcatagagtgtttcaaagatccaaatatgttctgtttgtgtccctgcatcccttctgtgacagttttcacactaagctctcagtgtcctgtgaaggtgtctcagaccgcctggaagcatgtcgggggtgaggcaggggtggggggttatgggactgggactggccccattagctccagtcagggcagctctgctcttacctggcttgtttctttgtttgtctgcattctatcccacttcaggggttctacagctaaaaggaatgtgagaactactgcccaagtaggcagaatgctaccagagaaagatttagacagacttgggtcaaatgcctgttttatcacttaacagctatgtgcctttaggaagcaagttcacctctccaaacctcagtttcctcatccctacagcaaagacagcaataccgaccttacagaagagttacaaggaatcactaacaccaacaactaaccctcatccagaaattaccatctatggctagtagacctgtggtttctccaaaagggcctgaaatgagattgtgtctgaggaggcttatgtagagctacagtgttggtgagagctttgctgagggacactggcattcagagaagaagtctttctggggctgactaaactagttttcctctgccaacatcccgctttatgtttacaatggaaggtgggtgatataaatgaagacttggtattctgttggtgggaaaaaagactggagaaattcaagagaaatacaag

SEQ ID NO: 3580 - DNA, 2001 bp, Homo sapiens
tgcattctcaggacctagcccaagctctggtacacaggaagcactcatagatatgtgagtgagtgggtctgtgggtatgggagtgagcgcatggtcagacagtcctgcaggctgccctgggtcctctagaggaaaacccaaacatcatcaagaattgcactattacacttcctgacaaacctttcatgtgacttatccaggtagtggtcatgctggggagcttctaccaagtgacctccaggaactctcagcattgccaaccagattcctaggtcaaagccactgttatcctccattgcttgctcttggaataaatgcccacctccatcctggagaataaaaaccaaaggtcccacagaacccctttctcccaaccagacaaagacagacggtatctgggccctaactacctggaaagatcatagagtgtttcaaagatccaaatatgttctgtttgtgtccctgcatcccttctgtgacagttttcacactaagctctcagtgtcctgtgaaggtgtctcagaccgcctggaagcatgtcgggggtgaggcaggggtggggggttatgggactgggactggccccattagctccagtcagggcagctctgctcttacctggcttgtttctttgtttgtctgcattctatcccacttcaggggttctacagctaaaaggaatgtgagaactactgcccaagtaggcagaatgctaccagagaaagatttagacagacttgggtcaaatgcctgttttatcacttaacagctatgtgcctttaggaagcaagttcacctctccaaacctcagtttcctcatccctacagcaaagacagcaataccgaccttacagaagagttacaaggaatcactaacaccaacaactaaccctcatccagaaattaccatctatggctagtagacctgtggtttctccaaaagggcctgaaatgagattgtgtctgaggaggcttatgtagagctacagtgttggtgagaactttgctgagggacactggcattcagagaagaagtctttctggggctgactaaactagttttcctctgccaacatcccgctttatgtttacaatggaaggtgggtgatataaatgaagacttggtattctgttggtgggaaaaaagactggagaaattcaagagaaatacaagtttacgtggatctgagctcagggaaaggcgggcagtagaagttgatgtgatttacctcaggtttagtcaacttagttgccctcccaaggttaaaaggtcaacaagtcctttgatgaccatttgcaagcagcctggaagaactcgttcagctaagtcactgcctctgagtacctccccgcaacacagacccaccagctcccacagtgctgccagtaatttcctaaaagtcctcactgcctaacccaaccctcacaaaatttactcttgagttaataattaaccacctcccgaggcttggtaatcccttcaaccatttcctaggatcagaggtggaggaggggtgtttgatttttttttcaaagtgaggaaaagtggacagctacctttcttgacaaaaggcacagcaactccatgcctgtgctgggccagagctctattttgtagtaacctgcaccatctctagactgtcaggtcagggtccatgctctgaaaggaggtgaccagtctcccttgaatgaggtgggctggggaatgtcttgcacttggtaattatctatgattccacattccaggaaccacactgactgtttaataatctttgacaaagataattgaactaatatatgtgaaagcactttgtaaattgaaagtagcatataattcttcttcttattaactgaaccctcattcaaaatgatgatgtatttattaacatatatgtaatatatacattgataaacttattgacataacaacatatttattaatgtggttatgtgttcatgctatattacattcaaaaagcaacttttaaaacagaaagatcc

SEQ ID NO: 3581 - DNA, 2001 bp, Homo sapiens
cctttcatgtgacttatccaggtagtggtcatgctggggagcttctaccaagtgacctccaggaactctcagcattgccaaccagattcctaggtcaaagccactgttatcctccattgcttgctcttggaataaatgcccacctccatcctggagaataaaaaccaaaggtcccacagaacccctttctcccaaccagacaaagacagacggtatctgggccctaactacctggaaagatcatagagtgtttcaaagatccaaatatgttctgtttgtgtccctgcatcccttctgtgacagttttcacactaagctctcagtgtcctgtgaaggtgtctcagaccgcctggaagcatgtcgggggtgaggcaggggtggggggttatgggactgggactggccccattagctccagtcagggcagctctgctcttacctggcttgtttctttgtttgtctgcattctatcccacttcaggggttctacagctaaaaggaatgtgagaactactgcccaagtaggcagaatgctaccagagaaagatttagacagacttgggtcaaatgcctgttttatcacttaacagctatgtgcctttaggaagcaagttcacctctccaaacctcagtttcctcatccctacagcaaagacagcaataccgaccttacagaagagttacaaggaatcactaacaccaacaactaaccctcatccagaaattaccatctatggctagtagacctgtggtttctccaaaagggcctgaaatgagattgtgtctgaggaggcttatgtagagctacagtgttggtgagagctttgctgagggacactggcattcagagaagaagtctttctggggctgactaaactagttttcctctgccaacatcccgctttatgtttacaatggaaggtgggtgatataaatgaagacttggtattctgttggtgggaaaaaagactggagaaattcaagagaaatacaagtttacatggatctgagctcagggaaaggcgggcagtagaagttgatgtgatttacctcaggtttagtcaacttagttgccctcccaaggttaaaaggtcaacaagtcctttgatgaccatttgcaagcagcctggaagaactcgttcagctaagtcactgcctctgagtacctccccgcaacacagacccaccagctcccacagtgctgccagtaatttcctaaaagtcctcactgcctaacccaaccctcacaaaatttactcttgagttaataattaaccacctcccgaggcttggtaatcccttcaaccatttcctaggatcagaggtggaggaggggtgtttgatttttttttcaaagtgaggaaaagtggacagctacctttcttgacaaaaggcacagcaactccatgcctgtgctgggccagagctctattttgtagtaacctgcaccatctctagactgtcaggtcagggtccatgctctgaaaggaggtgaccagtctcccttgaatgaggtgggctggggaatgtcttgcacttggtaattatctatgattccacattccaggaaccacactgactgtttaataatctttgacaaagataattgaactaatatatgtgaaagcactttgtaaattgaaagtagcatataattcttcttcttattaactgaaccctcattcaaaatgatgatgtatttattaacatatatgtaatatatacattgataaacttattgacataacaacatatttattaatgtggttatgtgttcatgctatattacattcaaaaagcaacttttaaaacagaaagatcccactagggataggcagatgagcacatgaataggagtaaacacacccaaatatcaatacgcattatctctataagtgggttcagggtgattttctttccctatcttttctttcttgtttacccatattttcaaattttttctacagaaaacgttttgctattgtaattttgagacagagt

SEQ ID NO: 3582 - DNA, 2001 bp, Homo sapiens
aataggagtaaacacacccaaatatcaatacgcattatctctataagtgggttcagggtgattttctttccctatcttttctttcttgtttacccatattttcaaattttttctacagaaaacgttttgctattgtaattttgagacagagtcttgctctgtcgcccaggctggagtgcagtggtgcgatctcagctcactgcaagctccacctcccgggttcacaccattctcccgcctcagcctcaggagtagctgggactacaggcacccagcaccatgcccggctaattttttgtatttttagtagagatggggtttcaccatgttagccaggatggtctcgatctcctgaccttgtgatctgcccgcctcagcctcccaaagtgctgagattacaggtgtaagccaccgtgcccagccactattgtaattttttaaacttaaaatgattaagacaatgcctccacctcatcccacaaccaacaggcaagaaggccttgtgggacgatgccctctgacagtaaccactgctctacccacacagcgcaaagaaagggaacaatttcagcaatagccttcttgaggcagtccccaatccaagcagactgggaaacttacacaattgaggatccagccctttatcatctcaccctccatcacaacatttgcaggagaactttagaagcacactcaaagagcaggaagacaaaccagatggccctgggcacctggaatagcagaggcgcagaggcccccagctctggatgagttccaggagggttgaggtgtggggcactcagactcagccagtacctggcatagggcaagcattccacagacacttcttgaatgagtcagtgagttacaagtcagtttgggaaacagctttgtaccaagttcctaggcatgccctggccctccctgagacaccctgctgggccctaggcacgcacggtgggctgatcattcagaagaggctgccttaagtgcaggaacaagaccatacagatggtggcataactacaagcacagattgtcactacacacatatctagttctaatcatagctttatgtctgccacctgggtgaacttaggcatgtgacttcaattgtctgagcccagttacctcatctgtaaaatggaaatgatgatccctactttggggaattcttgtgaagactatagaagatgtataacatttaccacagaccctagcccttaagcatttgtaggtggtaacaactgttaccagtgtacaagcattgctgtatgtacagcagtgggcacacattttcctctgctaaaggtgagagaccatttggagctacttagatgggtaagcctgaggaagaaggaatgaaaggcccatttaatgggttataaattgtgctttgaaggaaatcctgcagcatagaagctaagacagctgaaagggagcagggtgaattatgttttcaaaccacaatcatcaaccaaactgggtcaggaggcttaagtcctgggaacaagtctagactagagcaactagagacctgctggcagaccatgtgacaatatccaagacacatcatccaaagtgcttctgatttgaggtttacctccaagtgatttcctctagagagtagaataatttcatcagatgcctctcaccagaggctcttccttcaagcctgcttttaggatcatggttatagggcaagacctagaggttagtcttacaacaaggatacttagggtaaaagttgaaaggtcctgcccttgttctttcggtggagaaaaaagctctgcaatggccttgtctttccctgtctacaatttctgtcatcctgagaagactctacatgcggcatttgtgctttcccttcccactgggaaggtacgaaggtacttggatacatgacacaactctgtccaaatcgtcaccagcagaaacctctggagtgtgtgacagtaaaacctgagcaatttcagggttaggctgggagaagaaacctag

SEQ ID NO: 3583 - DNA, 2001 bp, Homo sapiens
ctcccaaagtgctgagattacaggtgtaagccaccgtgcccagccactattgtaattttttaaacttaaaatgattaagacaatgcctccacctcatcccacaaccaacaggcaagaaggccttgtgggacgatgccctctgacagtaaccactgctctacccacacagcgcaaagaaagggaacaatttcagcaatagccttcttgaggcagtccccaatccaagcagactgggaaacttacacaattgaggatccagccctttatcatctcaccctccatcacaacatttgcaggagaactttagaagcacactcaaagagcaggaagacaaaccagatggccctgggcacctggaatagcagaggcgcagaggcccccagctctggatgagttccaggagggttgaggtgtggggcactcagactcagccagtacctggcatagggcaagcattccacagacacttcttgaatgagtcagtgagttacaagtcagtttgggaaacagctttgtaccaagttcctaggcatgccctggccctccctgagacaccctgctgggccctaggcacgcacggtgggctgatcattcagaagaggctgccttaagtgcaggaacaggaccatacagatggtggcataactacaagcacagattgtcactacacacatatctagttctaatcatagctttatgtctgccacctgggtgaacttaggcatgtgacttcaattgtctgagcccagttacctcatctgtaaaatggaaatgatgatccctactttggggaattcttgtgaagactatagaagatgtataacatttaccacagaccctagcccttaagcatttgtaggtggtaacaactgttaccagtgtacaagcattgctgtatgtacagcagtgggcacacattttcctctgctaaaggtgagagaccatttggagctacttagatgggtaagcctgaggaagaaggaatgaaaggcccatttaacgggttataaattgtgctttgaaggaaatcctgcagcatagaagctaagacagctgaaagggagcagggtgaattatgttttcaaaccacaatcatcaaccaaactgggtcaggaggcttaagtcctgggaacaagtctagactagagcaactagagacctgctggcagaccatgtgacaatatccaagacacatcatccaaagtgcttctgatttgaggtttacctccaagtgatttcctctagagagtagaataatttcatcagatgcctctcaccagaggctcttccttcaagcctgcttttaggatcatggttatagggcaagacctagaggttagtcttacaacaaggatacttagggtaaaagttgaaaggtcctgcccttgttctttcggtggagaaaaaagctctgcaatggccttgtctttccctgtctacaatttctgtcatcctgagaagactctacatgcggcatttgtgctttcccttcccactgggaaggtacgaaggtacttggatacatgacacaactctgtccaaatcgtcaccagcagaaacctctggagtgtgtgacagtaaaacctgagcaatttcagggttaggctgggagaagaaacctagtgggaatactggaggtagaaaacaatcatgttactgagaaatcatggttttccattaaaaaaggcaagagagagttgagtgtgacaagtggctgcttgtcccctcaaatccacccttcctgtcttccatagtggggcacacagttgtccagctagaacgtacatttttctgcctcccttggagccaggtgtgcccacataaccaagtgcaggcaattgggtgtgcagagatgtgtacaacttctggatagtttccaaattaaagataaactgcgcttgccatgagtaagttctccttcctcttttatgaaaattgtaatacacacataacagtcacccaatttaaccattcggtcaaggtcaatgcactgagggaatc

SEQ ID NO: 3584 - DNA, 2001 bp, Homo sapiens
caggtgtaagccaccgtgcccagccactattgtaattttttaaacttaaaatgattaagacaatgcctccacctcatcccacaaccaacaggcaagaaggccttgtgggacgatgccctctgacagtaaccactgctctacccacacagcgcaaagaaagggaacaatttcagcaatagccttcttgaggcagtccccaatccaagcagactgggaaacttacacaattgaggatccagccctttatcatctcaccctccatcacaacatttgcaggagaactttagaagcacactcaaagagcaggaagacaaaccagatggccctgggcacctggaatagcagaggcgcagaggcccccagctctggatgagttccaggagggttgaggtgtggggcactcagactcagccagtacctggcatagggcaagcattccacagacacttcttgaatgagtcagtgagttacaagtcagtttgggaaacagctttgtaccaagttcctaggcatgccctggccctccctgagacaccctgctgggccctaggcacgcacggtgggctgatcattcagaagaggctgccttaagtgcaggaacaggaccatacagatggtggcataactacaagcacagattgtcactacacacatatctagttctaatcatagctttatgtctgccacctgggtgaacttaggcatgtgacttcaattgtctgagcccagttacctcatctgtaaaatggaaatgatgatccctactttggggaattcttgtgaagactatagaagatgtataacatttaccacagaccctagcccttaagcatttgtaggtggtaacaactgttaccagtgtacaagcattgctgtatgtacagcagtgggcacacattttcctctgctaaaggtgagagaccatttggagctacttagatgggtaagcctgaggaagaaggaatgaaaggcccatttaatgggttataaattgtgctttcaaggaaatcctgcagcatagaagctaagacagctgaaagggagcagggtgaattatgttttcaaaccacaatcatcaaccaaactgggtcaggaggcttaagtcctgggaacaagtctagactagagcaactagagacctgctggcagaccatgtgacaatatccaagacacatcatccaaagtgcttctgatttgaggtttacctccaagtgatttcctctagagagtagaataatttcatcagatgcctctcaccagaggctcttccttcaagcctgcttttaggatcatggttatagggcaagacctagaggttagtcttacaacaaggatacttagggtaaaagttgaaaggtcctgcccttgttctttcggtggagaaaaaagctctgcaatggccttgtctttccctgtctacaatttctgtcatcctgagaagactctacatgcggcatttgtgctttcccttcccactgggaaggtacgaaggtacttggatacatgacacaactctgtccaaatcgtcaccagcagaaacctctggagtgtgtgacagtaaaacctgagcaatttcagggttaggctgggagaagaaacctagtgggaatactggaggtagaaaacaatcatgttactgagaaatcatggttttccattaaaaaaggcaagagagagttgagtgtgacaagtggctgcttgtcccctcaaatccacccttcctgtcttccatagtggggcacacagttgtccagctagaacgtacatttttctgcctcccttggagccaggtgtgcccacataaccaagtgcaggcaattgggtgtgcagagatgtgtacaacttctggatagtttccaaattaaagataaactgcgcttgccatgagtaagttctccttcctcttttatgaaaattgtaatacacacataacagtcacccaatttaaccattcggtcaaggtcaatgcactgagggaatctaaaagaacctaggttccta

SEQ ID NO: 3585 - DNA, 24 bp, Homo sapiens
tgtatccagccaacttatacattc

SEQ ID NO: 3586 - DNA, 20 bp, Homo sapiens
gctgaggaaggatgagcaac

SEQ ID NO: 3587 - DNA, 280 bp, Homo sapiens
tgtatccagccaacttatacattctaaagtgtacaaaggattagctttacggtatgtgaataatagctcaataaagctattatttaaaataaacgtgcacacacacacacacacacacacacacacacatacacagctcactttacaacacatcaggacaataactccatggactgatatataatgataaactacagtcctttcttttgtatactaaggtgatgctactgtcccacagccatgacaacatatactaggtagttgctcatccttcctcagc

SEQ ID NO: 3588 - DNA, 25 bp, Homo sapiens
caaaggattagctttacggtatgtg

SEQ ID NO: 3589 - DNA, 20 bp, Homo sapiens
tcatggctgtgggacagtag

SEQ ID NO: 3590 - DNA, 211 bp, Homo sapiens; identical to SEQ ID NO: 36

SEQ ID NO: 3591 - DNA, 23 bp, Homo sapiens
ggattagctttacggtatgtgaa

SEQ ID NO: 3592 - DNA, 22 bp, Homo sapiens
ccatggagttattgtcctgatg

SEQ ID NO: 3593 - DNA, 135 bp, Homo sapiens
ggattagctttacggtatgtgaataatagctcaataaagctattatttaaaataaacgtgcacacacacacacacacacacacacacacacatacacagctcactttacaacacatcaggacaataactccatgg

SEQ ID NO: 3594 - DNA, 22 bp, Homo sapiens
catcaatccatggcagctaaat

SEQ ID NO: 3595 - DNA, 22 bp, Homo sapiens
ttagaaactgtcccctggcaat

SEQ ID NO: 3596 - DNA, 706 bp, Homo sapiens
attgtgacatgtgtattttagtttcttcatcagtaaaactgagatggcaatagtacctgccttgtaagttgttgtgaggattagagatagtggctataaaatgggtggtacaaaaatggatgcactgtaggtgtttaagaaatgatggctctgaccatcaatccatggcagctaaatgctggagcccacaggagaggccaggaggatggcagaagagttctgttctgtggtttccctgtgattaatgcagactctggtttcttctgtattcttttccttgcctagtattgatcctccagaaggtggagaatggagacctgagcaacaagattctgaagatcactgattttggcctggctcgggaatggcaccgaaccaccaagatgagtgcggcagggacgtatgcttggatggcacccgaagtcatccgggcctccatgttttccaaaggcagtgatgtgtggaggtaaggtccaggggggcagggacagcatttcctaggtccatcttggtggcacacacatttcaagacttggagaattgaggttacctaggatcccaggcacctgaagtaggtctaagtgacctcccccaagagtcatctatgccaattcccatattgccaggggacagtttctaatgctttcatctaccaaaaaaatccctgaagtgctatacgcaggccactttttgctggtgattgctc

SEQ ID NO: 3597 - DNA, 22 bp, Homo sapiens
catcaatccatggcagctaaat

SEQ ID NO: 3598 - DNA, 22 bp, Homo sapiens
ttagaaactgtcccctggcaat

SEQ ID NO: 3599 - DNA, 1387 bp, Homo sapiens
ataaggctttcacaagctttggtgctttaatgattagtagcaacgggtgcttggtagataccggtatttgaggacatgattattgagagtcactggcgtgcactaccacacctagctaattttttgtatttttagtagagacgggatttcaccatgttggccaggcaggtgtcaaactcctaatctcaggtgatccacccgtctcggcctccccaaatgctgggattacatgcgtgaaccactgtgcccagccaggaatttatttaattgtgacatgtgtattttagtttcttcatcagtaaaactgagatggcaatagtacctgccttgtaagttgttgtgaggattagagatagtggctataaaatgggtggtacaaaaatggatgcactgtaggtgtttaagaaatgatggctctgaccatcaatccatggcagctaaatgctggagcccacaggagaggccaggaggatggcagaagagttctgttctgtggtttccctgtgattaatgcagactctggtttcttctgtattcktttccttgcctagtattgatcctccagaaggtggagaatggagacctgagcaacaagattctgaagatcactgattttggcctggctcgggaatggcaccgaaccaccaagatgagtgcggcagggacgtatgcttggatggcacccgaagtcatccgggcctccatgttttccaaaggcagtgatgtgtggaggtaaggtccaggggggcagggacagcatttcctaggtccatcttggtggcacacacatttcaagacttggagaattgaggttacctaggatcccaggcacctgaagtaggtctaagtgacctcccccaagagtcatctatgccaattcccatattgccaggggacagtttctaatgctttcatctaccaaaaaaatccctgaagtgctatacgcaggccactttttgctggtgattgctccctaggaaaggccagtagattccaggggcaacatgtactcccatctctacgctgtaagatgggaaggacactcggtccttctcggagagcttcgtgaggatcagtctggcttgctcagcaatgctaggctttcgtggctgttactgctgaacttggggaggggattaacccaatgtcctcactctaaagctcctgagccaatgaatgttctttgtgcaatctcgtttttcttgatggcctaaaaattaccttttccagttatctagttcatcttttagtcaaggctctatctgttgacattgatccagaaatcagaaaaaaatgggtcccaaatatgtgcccagaactgcaaagccgcagactagaaatgaccagccatcctcctagtaaatgtgagcccaaaaggttgcaagga

SEQ ID NO: 3600 - DNA, 22 bp, Homo sapiens
catcaatccatggcagctaaat

SEQ ID NO: 3601 - DNA, 22 bp, Homo sapiens
ttagaaactgtcccctggcaat

SEQ ID NO: 3602 - DNA, 1775 bp, Homo sapiens
caacattgtgaatgtacacaatatcactaaattgttcactttgaaatggttaattttatgttatgtggatttcagcccaaaaaaaaggtctacaaaaaataaaataaggctttcacaagctttggtgctttaatgattagtagcaacgggtgcttggtagataccggtatttgaggacatgattattgagagtcactggcgtgcactaccacacctagctaattttttgtatttttagtagagacgggatttcaccatgttggccaggcaggtgtcaaactcctaatctcaggtgatccacccgtctcggcctccccaaatgctgggattacatgcgtgaaccactgtgcccagccaggaatttatttaattgtgacatgtgtattttagtttcttcatcagtaaaactgagatggcaatagtacctgccttgtaagttgttgtgaggattagagatagtggctataaaatgggtggtacaaaaatggatgcactgtaggtgtttaagaaatgatggctctgaccatcaatccatggcagctaaatgctggagyccacaggagaggccaggaggatggcagaagagttctgttctgtggtttccctgtgattaatgcagactctggtttcttctgtattcttttccttgcctagtattgatcctccagaaggtggagaatggagacctgagcaacaagattctgaagatcactgattttggcctggctcgggaatggcaccgaaccaccaagatgagtgcggcagggacgtatgcttggatggcacccgaagtcatccgggcctccatgttttccaaaggcagtgatgtgtggaggtaaggtccaggggggcagggacagcatttcctaggtccatcttggtggcacacacatttcaagacttggagaattgaggttacctaggatcccaggcacctgaagtaggtctaagtgacctcccccaagagtcatctatgccaattcccatattgccaggggacagtttctaatgctttcatctaccaaaaaaatccctgaagtgctatacgcaggccactttttgctggtgattgctccctaggaaaggccagtagattccaggggcaacatgtactcccatctctacgctgtaagatgggaaggacactcggtccttctcggagagcttcgtgaggatcagtctggcttgctcagcaatgctaggctttcgtggctgttactgctgaacttggggaggggattaacccaatgtcctcactctaaagctcctgagccaatgaatgttctttgtgcaatctcgtttttcttgatggcctaaaaattaccttttccagttatctagttcatcttttagtcaaggctctatctgttgacattgatccagaaatcagaaaaaaatgggtcccaaatatgtgcccagaactgcaaagccgcagactagaaatgaccagccatcctcctagtaaatgtgagcccaaaaggttgcaaggaaatagatctaaaatttttcccagctgaggaaggatgagcaactacctagtatatgttgtcatggctgtgggacagtagcatcaccttagtatacaaaagaaaggactgtagtttatcattatatatcagtccatggagttattgtcctgatgtgttgtaaagtgagctgtgtatgtgtgtgtgtgtgtgtgtgtgtgtgtgtgtgcacgtttattttaaataatagctttattgagctattattcacataccgtaaagctaatcctttgtacactttagaatgta

SEQ ID NO: 3603 - DNA, 20 bp, Homo sapiens
cactcaatcctttgcccatt

SEQ ID NO: 3604 - DNA, 20 bp, Homo sapiens
actgcatagccacatgcaaa

SEQ ID NO: 3605 - DNA, 394 bp, Homo sapiens
cactcaatcctttgcccatttttaaagtaagtggtttgtctttttattattgagttataagagctcttcatatattctgatactagacccttatcagatacatgacttgcaaatatttctcccattctactggctgtcttctcccttacttgatacttttgatacaccaaagtttttaatttagatgaagtccactttatttttttatttattgcacatacttttggtataatatctaagaatcattaacacattcaagatcatgaagatttaattctatgttttcttccaaaagttttatggtttcagctcttacatttaggtcattgatccacttttaatttctgcatataacaggggtcgaatttcattcttttgcatgtggctatgcagt

SEQ ID NO: 3606 - DNA, 20 bp, Homo sapiens
gtctgtggtgatgctgctgt

SEQ ID NO: 3607 - DNA, 20 bp, Homo sapiens
ggtgtggtggcacataccta

SEQ ID NO: 3608 - DNA, 744 bp, Homo sapiens
  misc_feature 501: n = A,T,C or G
aaacacaaacagaggggagagctgttatctcccaacatgctttcctgagtggaagagaaaggttatattcacagcagtttacatatttgtaccactgcagtaagcccactgtaaacttctaccactgacaaacagctgtggcaataacaaactgtcatgctttcacatcttgaaaaatgtaagaatgttttatcaaattttggtgaagtccataagagtgcattgtgtaaacctcacctctcctgtcgagcaatggcaaaaacagtcatgcaccgcataatgacgtttcagtcaatgacaggccaaaaccatgatggtggtaccataaggtaataatagggctaaaaacttcctatcacctagtgatgatggcagctgtcataatgtcatggcaccatgtattctcatgtgtctgtggtgatgctgctgtaaacaaacctactgtgcaggcagtcgtataacagcatagcatatacaattatgtaccatacataatacctngataatgctaataagcgactatgttactggtttatgtatttactttttttttttttggacccaaggtctcactctgtcattcaggctggtgtgcagtggtgcaatcatagcttattgcagcctcaatctcctgggctcaagtgattctcccacctcagcctcctgagtagctgtgactataggtatgtgccaccacacccaactaattattttagtttttgtagagaagtgggtctcacttca

SEQ ID NO: 3609 - DNA, 20 bp, Homo sapiens
gtctgtggtgatgctgctgt

SEQ ID NO: 3610 - DNA, 20 bp, Homo sapiens
cagcctggacaatgaagtga

SEQ ID NO: 3611 - DNA, 744 bp, Homo sapiens; identical to SEQ ID NO: 3608
  misc_feature 501: n = A,T,C or G

SEQ ID NO: 3612 - DNA, 20 bp, Homo sapiens
agtttgggtggcagagtgag

SEQ ID NO: 3613 - DNA, 25 bp, Homo sapiens
aacaatggagcttaacataaacaca

SEQ ID NO: 3614 - DNA, 151 bp, Homo sapiens
agtttgggtggcagagtgagtgagacctctctctcaaaaacaaacaaacaacaaaaaaaaagtaaatagaaaaaagctcatagaataaggataaaagaaagaaaatgtttttgtaaagctgtacagtgtgtttatgttaagctccattgtt

SEQ ID NO: 3615 - DNA, 20 bp, Homo sapiens
attagctgggtgtggtggtc

SEQ ID NO: 3616 - DNA, 21 bp, Homo sapiens
ccatgaaatggagcttacagg

SEQ ID NO: 3617 - DNA, 300 bp, Homo sapiens
attagctgggtgtggtggtccgtgcctgtactcccagctactcaggaggctgaggcagaagaattgcttgaacttgggaagcagaggttgcagtgagccacgattgcaccactgcactccagcctgggtgacagagtgagactccgtctaaaaaaaagttttctttataaatttagtgtagcctaagtgtacagtgtttataaggtctatggtggtatacagtaatgtcctaggtcttcacattcactcaccactcactcacccagggcaacttccagtcctgtaagctccatttcatgg

SEQ ID NO: 3618 - DNA, 2001 bp, Homo sapiens
ccgtgcctgtactcccagctactcaggaggctgaggcagaagaattgcttgaacttgggaagcagaggttgcagtgagccacgattgcaccactgcactccagcctgggtgacagagtgagactccgtctaaaaaaaagttttctttataaatttagtgtagcctaagtgtacagtgtttataaggtctatggtggtatacagtaatgtcctaggtcttcacattcactcaccactcactcacccagggcaacttccagtcctgtaagctccatttcatggtgagtgttctgtaaagaagtaccattttttatttttatatcatatttttactgtaccttttctacgtatagatacatttaggtacacaaagtcttagcactgcattacaattgtctacaatattcagtacagtaacatgtacacgtttgtagcctggaaacagcagactacaccaggggtgtccaatctttcggcttccctgggccatattggaagaaatgtcttgggccacacataaaatacaccaacaacagctaaaaaaaaaaaaaaacaaaaaaaaacaaaaaaaaaaaaacaaaggaaaaagtgtcctgagccatagcgggacaagcttgggctacaccatatagcccaggtgtgtagtataagtacactctgatgttcgcacgatgatgaaattgcctaatgatgcatttctcagaatgtatccctgccattaagtgatgtgtgactgtaccgagaagaactaacgagtctaggcgtaagtcaatgggggcctggccaggcagtggaacagaaaggaaaagatacattggaactaaagacccagtgattaaccagatgtaggggcctgatggagaaggaagacatctccagcctttcaggtttgggtgacaagcagaagaatggtggtgcccctaattgggaagttgagagaaaaagcccatttgaagaagccaagtttagttttggacataatgggtctaggttcactgtaacaagagtcagtatggaacaggaaaagagcagataatttaaatcctaggcttgacactcttaatgtgaccctggacaaatctcttaaactttgtacctcaattcctgcttctacaaaatggggataaagattaaaggcgatacagcaataaagcaactagcagagtacctggcacttggagcactatagttattattataattaggtatcctgtacataaatggaaaccatagggttcagcgctcaagggactgatatggaaggcctggcagtccctgacacacaataaccacgcaatacatttttgctgtatagataaatggaatgcttgattaataatgacacctactcattatgggtcacttactacgtagcagcacgatgctgtttatgtccatcacttttgttaatccttaaatcacccctcagcagtaggtgtaattattttccccattttatgcactccaaaccagacacagaaaggttaagtcagttgcccagtcagtgagggatggggaagggaatcaaatccagatctgtctgacttcagaaccacattcttcacctttgtgccatgccgtacagaggccagaaagaaatcctatgtgtctttaagccctgcctccatttctgcctaatccctaaagctgtaattgattagtctaccctgcacttctttttcctgaattcttccttcagcatccaaataccacataatctaacactatatgcacttctaatcactcctgactgctgcatatatatgggtgtcatcatttccgctagcatgtgatacagtatgactcctagaaagcaaaaacctcattctttttcttctggaacctatgccatgtcccctttaggaaccaagcacaggaccaggctctttgaaagaactcatcccggctgggtgcggtggctcatgcctataatctcagcactttaggaggctgaggtgggcgggtcacctgaggtcagcagttcaagacgagactggccaac

SEQ ID NO: 3619 - DNA, 2001 bp, Homo sapiens
aagaactaacgagtctaggcgtaagtcaatgggggcctggccaggcagtggaacagaaaggaaaagatacattggaactaaagacccagtgattaaccagatgtaggggcctgatggagaaggaagacatctccagcctttcaggtttgggtgacaagcagaagaatggtggtgcccctaattgggaagttgagagaaaaagcccatttgaagaagccaagtttagttttggacataatgggtctaggttcactgtaacaagagtcagtatggaacaggaaaagagcagataatttaaatcctaggcttgacactcttaatgtgaccctggacaaatctcttaaactttgtacctcaattcctgcttctacaaaatggggataaagattaaaggcgatacagcaataaagcaactagcagagtacctggcacttggagcactatagttattattataattaggtatcctgtacataaatggaaaccatagggttcagcgctcaagggactgatatggaaggcctggcagtccctgacacacaataaccacgcaatacatttttgctgtatagataaatggaatgcttgattaataatgacacctactcattatgggtcacttactacgtagcagcacgatgctgtttatgtccatcacttttgttaatccttaaatcacccctcagcagtaggtgtaattattttccccattttatgcactccaaaccagacacagaaaggttaagtcagttgcccagtcagtgagggatggggaagggaatcaaatccagatctgtctgacttcagaaccacattcttcacctttgtgccatgccgtacagaggccagaaagaaatcctatgtgtctttaagccctgcctccatttctgcctaatccctaaagctgtaattgattagtctaccctgcacttctttttcctgaattcttccttcagcatccaaataccacataatctaacactatatgcacttctaatcactcctgactgctgcatatatatgggtgtcatcatttccgctagcatgtgatacagtatgactcctagaaagcaaaaacctcattctttttcttctggaacctatgccatgtcccctttaggaaccaagcacaggaccaggctctttgaaagaactcatcccggctgggtgcggtggctcatgcctataatctcagcactttaggaggctgaggtgggcgggtcacctgaggtcagcagttcaagacgagactggccaacatagcaaaaccctgtctctactaaaaatacaaaaattagctgggcatggtggcacacacttgtagtcccagctacttggaaggctgaggcaggagaatttcttgaacccatgaggcggaggttgaagtgagccgagactgcgccactgcactccagcctgggcaacagagtgacactcagtctcaaaaaaaaaaaaaaaaaaaaaaaagaactcatctcttgctggtcacatacttgaccaatgggatatctgtgcatcttctcaaactatccactttcccatcttattgttgccaggtattggggtagggggtggaggggcactgggaggagactagagaaagagtaatacctcagccaggggttcaccagtgactaacacacccagttagtgccaggtcgggtaggggacacacagagaaagataacctgaagactctcagcttatctcaacggcctttcgccttctataaggaaagacaatgtgacaaaagtgagtatcaggtcaagacagggtctcactctgttgcccagaatggagtgcagtggcacaatcatagctcactgtaaccttgaactactgggctcaagcgtttctccacctcagcattccgagtagctaggactacaggtgcgcaccaccaaccccagctaattttttattttttgtattgaccggttggtcttgaacgcctggtctcaagcaatcctcctgccttggcttcccaaacactggaattac

SEQ ID NO: 3620 - DNA, 2001 bp, Homo sapiens
cctgaattcttccttcagcatccaaataccacataatctaacactatatgcacttctaatcactcctgactgctgcatatatatgggtgtcatcatttccgctagcatgtgatacagtatgactcctagaaagcaaaaacctcattctttttcttctggaacctatgccatgtcccctttaggaaccaagcacaggaccaggctctttgaaagaactcatcccggctgggtgcggtggctcatgcctataatctcagcactttaggaggctgaggtgggcgggtcacctgaggtcagcagttcaagacgagactggccaacatagcaaaaccctgtctctactaaaaatacaaaaattagctgggcatggtggcacacacttgtagtcccagctacttggaaggctgaggcaggagaatttcttgaacccatgaggcggaggttgaagtgagccgagactgcgccactgcactccagcctgggcaacagagtgacactcagtctcaaaaaaaaaaaaaaaaaaaaaaaagaactcatctcttgctggtcacatacttgaccaatgggatatctgtgcatcttctcaaactatccactttcccatcttattgttgccaggtattggggtagggggtggaggggcactgggaggagactagagaaagagtaatacctcagccaggggttcaccagtgactaacacacccagttagtgccaggtcgggtaggggacacacagagaaagataacctgaagactctcagcttatctcaacggcctttcgccttctataaggaaagacaatgtgacaaaagtgagtatcaggtcaagacagggtctcactctgttgcccagaatggagtgcagtggcacaatcatagctcactgtaaccttgaactactgggctcaagcgtttctccacctcagcattccgagtagctaggactacaggtgcgcaccaccaaccccagctaattttttattttttgtattgaccggctggtcttgaacgcctggtctcaagcaatcctcctgccttggcttcccaaacactggaattacagaagtgagccactgtgcctggcacaaagacatcattcttgattatttcccaattaggacaccacctatatataccacttaatattattatttaaataatatttaatgggcatcaaaaaatagaaagaataagacctagtatttgatagcacaacagggtgactatagtcaaaataatttaattgtacatttaaaaataactaaagtataattgagctgcttgtaacacaaaggataaacgcttgaggggatggatatcccattttccatgatgtgattattatgcatcatatgcctgtatcacaatatctcatgtaccccaaaaatatatacacctattatgtacccacaaaaattaaaaattaaaaaaaaatttaaagaagaaattctatatcactattgtaaatgggaaagccaaaaattctcctaacattgagtaacctgtacaaacaaataaaatgaaacaaaaataaatggtacagtggcagacccgcatatggtcaaaatgctgagcctaaggcctgccttctctgcttgagaagaaagatttgaagtgttagagaggaattacagacaaacagcaccaaaatgaatgttgatcctccatttacacaaaaaagctgaatgactttctttgggattcaatgttgcttaatgcagaccacttaaaatggtctcaaggccatcccattaggaggtcagcaggagaaatcgggggtgtcttgccactaagggatttgtgaatctgacctaatatcatttagctgaggccaggctctcaaaacttggcatcactgaggagactctcccattaggtcctaatggtaaacttagctttggttgatgatctatgtcattttcagatttcttatttattattcatctccattagtacaagaggcttcaatttgctaaatgctcaccttggtgccaaggct

SEQ ID NO: 3621 - DNA, 801 bp, Homo sapiens
aatacctcagccaggggttcaccagtgactaacacacccagttagtgccaggtcgggtaggggacacacagagaaagataacctgaagactctcagcttatctcaacggcctttcgccttctataaggaaagacaatgtgacaaaagtgagtatcaggtcaagacagggtctcactctgttgcccagaatggagtgcagtggcacaatcatagctcactgtaaccttgaactactgggctcaagcgtttctccacctcagcattccgagtagctaggactacaggtgcgcaccaccaaccccagctaattttttattttttgtattgaccggttggtcttgaacgcctggtctcaagcaatcctcctgccttggcttcccaaacactggaattacagaagcgagccactgtgcctggcacaaagacatcattcttgattatttcccaattaggacaccacctatatataccacttaatattattatttaaataatatttaatgggcatcaaaaaatagaaagaataagacctagtatttgatagcacaacagggtgactatagtcaaaataatttaattgtacatttaaaaataactaaagtataattgagctgcttgtaacacaaaggataaacgcttgaggggatggatatcccattttccatgatgtgattattatgcatcatatgcctgtatcacaatatctcatgtaccccaaaaatatatacacctattatgtacccacaaaaattaaaaattaaaaaaaaatttaaagaagaaattctatatcactattgtaaa

SEQ ID NO: 3622 - DNA, 1002 bp, Homo sapiens
atgactttctttgggattcaatgttgcttaatgcagaccacttaaaatggtctcaaggccatcccattaggaggtcagcaggagaaatcgggggtgtcttgccactaagggatttgtgaatctgacctaatatcatttagctgaggccaggctctcaaaacttggcatcactgaggagactctcccattaggtcctaatggtaaacttagctttggttgatgatctatgtcattttcagatttcttatttattattcatctccattagtacaagaggcttcaatttgctaaatgctcaccttggtgccaaggctcatgtcctcaggcctgcatttggttcagatgattcaatgccatctctcctacattacgtaactcagctaatttggttttgagggttatgttttgttttattttttaaagtttattgttaaacgtattatacacataggagagtacattaaaatgtatacatgtaacatgtacaaatgtatatatggcgtgggagtggtggagcacacccgtagtcccagctacttgggaggctgaggcaggagaatggcttgagcccaggaattcaaggctatagcaccaccatgtttgtgcctgtgaacagccactgcactccaatctgggcaacacagtgaaactccatttctaaaatttaaaaatgtatatatggtttaaagaacataatatgaaaacccacataatcccatccggtccctttagaagttccatgtgtctctctccaccaccccctttcctctctccctaaacatctgacaaccgtgacttctgttattcatttctttacttctctttatgattttaccagctatgtacacatctctaaataagataatgtttagttttgaaaaagtgagtggcaaacaaaaaatgaagctgtgtgttgtagcctcctagggctgccataacaaattaacagaaactgggtggctcaaaacaatagaaattattctctcacagttctggaggtta

SEQ ID NO: 3623 - DNA, 20 bp, Homo sapiens
gggtcaaggtaattgcgaga

SEQ ID NO: 3624 - DNA, 20 bp, Homo sapiens
tatgccattgcactccagtc

SEQ ID NO: 3625 - DNA, 105 bp, Homo sapiens
gggtcaaggtaattgcgagagtgggactcttctgtattttctgtttcttttgtttgtttgtttttgagtctcaatctgtcacccagactggagtgcaatggcata

SEQ ID NO: 3626 - DNA, 21 bp, Homo sapiens
ggaaaccaaagcaaatgaatg

SEQ ID NO: 3627 - DNA, 20 bp, Homo sapiens
aggcatagaaagggagacca

SEQ ID NO: 3628 - DNA, 125 bp, Homo sapiens
ggaaaccaaagcaaatgaatgggtacaaaacacccctcatagagagagagagagagcattcaatacagtgaccttttcctgagctagagtaaagctgaactacagtggtctccctttctatgcct

SEQ ID NO: 3629 - DNA, 20 bp, Homo sapiens
aagatcgcgccattacactc

SEQ ID NO: 3630 - DNA, 20 bp, Homo sapiens
attgaatttgcagggtccag

SEQ ID NO: 3631 - DNA, 342 bp, Homo sapiens
aagatcgcgccattacactccagcctgggcgacagagcgagactccgtctcaaaataaataaataaataaaataaatatttgggaagctcacagacactcaggatcaaactctaatagcttggcaaggtgtggtggcaaaagcttaccggcaggcagcatctccccaggcataatttaggacaaatatgtgctaaaagcaccatggctgagacagtagcttgtggcttgcggggagggtgttgatgggcaggagaagaaaccctcctacactaggtctgaaaccatttcagaagttttgagttttgctttgagtagtacaggctggaccctgcaaattcaat

SEQ ID NO: 3632 - DNA, 20 bp, Homo sapiens
cgcatgcctgagaatctacc

SEQ ID NO: 3633 - DNA, 20 bp, Homo sapiens
agcctgggtgacagagtgat

SEQ ID NO: 3634 - DNA, 247 bp, Homo sapiens
cgcatgcctgagaatctacctactttggcagaaactggtaaaagataccaaccactgtggttactagaaaaggtcgacagtcacctacacagaaaaaaggaaaggaaaagagagggataaatagatgatcctataaaggaaactaggacggaacctctctctctcccttttgttttttgttgtttgttgttgttgttattgttgttgttgttgttttgagacaaggtatcactctgtcacccaggct

SEQ ID NO: 3635 - DNA, 22 bp, Homo sapiens
aaggaaactaggacggaacctc

SEQ ID NO: 3636 - DNA, 20 bp, Homo sapiens
agcctgggtgacagagtgat

SEQ ID NO: 3637 - DNA, 112 bp, Homo sapiens
aaggaaactaggacggaacctctctctctcccttttgttttttgttgtttgttgttgttgttattgttgttgttgttgttttgagacaaggtatcactctgtcacccaggct

SEQ ID NO: 3638 - DNA, 25 bp, Homo sapiens
cattctggccatataagtctacacc

SEQ ID NO: 3639 - DNA, 24 bp, Homo sapiens
ctccttcttctccctttctacctc

SEQ ID NO: 3640 - DNA, 401 bp, Homo sapiens
agtacttatataaaaacagatgtactgttttaatctctatttacggatatgtactgttttaatctctacttacagatgaagaagctgtggctgagaagtgaggatattcccctgagctacccagccagaaagtggtaaagtggggaccactggctactctcatgctcttgatgatgccttaccctaccccgtccacccatsttgtttgaacacctaacatggaggatgcctgaaactagaatgtacagaggaaggggctccttagaaggggctcacagaataaacaactgctctctgtgctgtaacgagaggacagggtttggtccagggggagaatcagaagaaagaccactcccagcagagggaataacgtgagtccaggtccaagagggctgaggggc

SEQ ID NO: 3641 - DNA, 2001 bp, Homo sapiens
ggaagactacagaccctgccaaggaacttggaaatgaccctggagtcacaagtagtttttaagcagaaaagtgttgtgacaagatttgagtttcagcaaaacaactatggttgcagtgagacaaattaaactgaaaaagcaacagactggcagtgagccacagtaagtaacctattacaattgtccaggggacaatggtgaatgacaaactcaagtactggggatggaaaggatgggacagtcagacagagtaattaatttcacatacacggagaaagagtggtccatgagtcctaggaaatctctctgacatcacatcacttacttgctctggctaagtccctgtatgtcaccaatctcacaggaatatactagcatttagtgagttcagcggggtttagtggtcccactcctcctacctctaggctaacattcacccacccactcttcccttccaacaggaactgaagcttctgcagccacaaacacctagaaacagggttccttcattttcagttgtagctaccaactcacatattactgactgctactaactagaccagatgcaattccacagttctggcatgctgagaacagccactccttgccaacgcggctcagtcctgcattcatttgggacatctctggcaagcccccaggtatcagtgcaatgcactttgcaatgtcagccaagggcatgcagcaaggaactcagggaatggcacaacctaagaatgacgtcagaggagacagaacggatagatgagcttcctggggctggctagtgtcttgatccttcagacaggcacccaggccttatgcaaagttttcagacaggctggttagttaacaagattgggatactagggtgatagtttgaaccaggccactcccaaacaactctggctggccataatgtgcatatgtgttctggggaacaagggaacaaatcagatgtattcatgtggaccagcactggagaaacaacccaaagcaccagccttcctcataatgtgcccacatccatgcctgccgcatgacttaacagcatgaggtgtggatttctgctgccttgttgggctggaggatagaaggagacatgatagggaactaatatatttataggcctcctgtaggcacagcacaattcatcagccttgaaaaatgactcctttaaccagccccaactttctatgggaacttcactttcatctctttcttggaggccgtacccacttcccacatctcccatgctgctgagtgaaaggttctcatgattaaaacagaagaataagcaccatctccctgaccaaacctcccacgtgtctgcaggacacctagctctctctaacatcctaaaatataactgcttcaaaaggcgtcaacttggacacctacagcccttgccatcttgtgcaaattaagcccagaaaacacagctgggactccatccctcacctcatccaggcgcagatatcaccagcaggaaacagaaagccagaggcttttgtgcagccactttccttactaaagaacatctccttaaacacctgcctcccctgaattttctcatcgtatcagctcaaactgactgagaagagctgccagatctccgtcatacctctgaagtacccagctacataccagataaaaataaccaaaaaagaggaagcctatcagatgctcgatggttttgtcaacagaaagcagttctttcttggcaggtggccatggggtgcagccgccgcacaggctctccagggccttgtatccccaagctctgctagcagagttcccttagcaggcatggaaggttgcattttcaaagtggtccatcatctcccatcctctgtgcttttccccagtgtgatcttgacacttttcccactgagaggtgggtctgtgtcctctccacttgaagctgagtggtcttgagactcactttaacagaatgcagaagaaatgacaatgcccgacttctaagctagatcagaaaagatg

SEQ ID NO: 3642 - DNA, 2001 bp, Homo sapiens
agcagaaaagtgttgtgacaagatttgagtttcagcaaaacaactatggttgcagtgagacaaattaaactgaaaaagcaacagactggcagtgagccacagtaagtaacctattacaattgtccaggggacaatggtgaatgacaaactcaagtactggggatggaaaggatgggacagtcagacagagtaattaatttcacatacacggagaaagagtggtccatgagtcctaggaaatctctctgacatcacatcacttacttgctctggctaagtccctgtatgtcaccaatctcacaggaatatactagcatttagtgagttcagcggggtttagtggtcccactcctcctacctctaggctaacattcacccacccactcttcccttccaacaggaactgaagcttctgcagccacaaacacctagaaacagggttccttcattttcagttgtagctaccaactcacatattactgactgctactaactagaccagatgcaattccacagttctggcatgctgagaacagccactccttgccaacgcggctcagtcctgcattcatttgggacatctctggcaagcccccaggtatcagtgcaatgcactttgcaatgtcagccaagggcatgcagcaaggaactcagggaatggcacaacctaagaatgacgtcagaggagacagaacggatagatgagcttcctggggctggctagtgtcttgatccttcagacaggcacccaggccttatgcaaagttttcagacaggctggttagttaacaagattgggatactagggtgatagtttgaaccaggccactcccaaacaactctggctggccataatgtgcatatgtgttctggggaacaagggaacaaatcagatgtattcatgtggaccagcactggagaaacaacccaaagcaccaggcttcctcataatgtgcccacatccatgcctgccgcatgacttaacagcatgaggtgtggacttctgctgccttgttgggctggaggatagaaggagacatgatagggaactaatatatttataggcctcctgtaggcacagcacaattcatcagccttgaaaaatgactcctttaaccagccccaactttctatgggaacttcactttcatctctttcttggaggccgtacccacttcccacatctcccatgctgctgagtgaaaggttctcatgattaaaacagaagaataagcaccatctccctgaccaaacctcccacgtgtctgcaggacacctagctctctctaacatcctaaaatataactgcttcaaaaggcgtcaacttggacacctacagcccttgccatcttgtgcaaattaagcccagaaaacacagctgggactccatccctcacctcatccaggcgcagatatcaccagcaggaaacagaaagccagaggcttttgtgcagccactttccttactaaagaacatctccttaaacacctgcctcccctgaattttctcatcgtatcagctcaaactgactgagaagagctgccagatctccgtcatacctctgaagtacccagctacataccagataaaaataaccaaaaaagaggaagcctatcagatgctcgatggttttgtcaacagaaagcagttctttcttggcaggtggccatggggtgcagccgccgcacaggctctccagggccttgtatccccaagctctgctagcagagttcccttagcaggcatggaaggttgcattttcaaagtggtccatcatctcccatcctctgtgcttttccccagtgtgatcttgacacttttcccactgagaggtgggtctgtgtcctctccacttgaagctgagtggtcttgagactcactttaacagaatgcagaagaaatgacaatgcccgacttctaagctagatcagaaaagatgctacagcttccccatgttcactggaacacttgggtctgcagccttgagccactatgtaagg

SEQ ID NO: 3643 - DNA, 2001 bp, Homo sapiens
agtttcagcaaaacaactatggttgcagtgagacaaattaaactgaaaaagcaacagactggcagtgagccacagtaagtaacctattacaattgtccaggggacaatggtgaatgacaaactcaagtactggggatggaaaggatgggacagtcagacagagtaattaatttcacatacacggagaaagagtggtccatgagtcctaggaaatctctctgacatcacatcacttacttgctctggctaagtccctgtatgtcaccaatctcacaggaatatactagcatttagtgagttcagcggggtttagtggtcccactcctcctacctctaggctaacattcacccacccactcttcccttccaacaggaactgaagcttctgcagccacaaacacctagaaacagggttccttcattttcagttgtagctaccaactcacatattactgactgctactaactagaccagatgcaattccacagttctggcatgctgagaacagccactccttgccaacgcggctcagtcctgcattcatttgggacatctctggcaagcccccaggtatcagtgcaatgcactttgcaatgtcagccaagggcatgcagcaaggaactcagggaatggcacaacctaagaatgacgtcagaggagacagaacggatagatgagcttcctggggctggctagtgtcttgatccttcagacaggcacccaggccttatgcaaagttttcagacaggctggttagttaacaagattgggatactagggtgatagtttgaaccaggccactcccaaacaactctggctggccataatgtgcatatgtgttctggggaacaagggaacaaatcagatgtattcatgtggaccagcactggagaaacaacccaaagcaccaggcttcctcataatgtgcccacatccatgcctgccgcatgacttaacagcatgaggtgtggatttctgctgccttgttgggctggaggacagaaggagacatgatagggaactaatatatttataggcctcctgtaggcacagcacaattcatcagccttgaaaaatgactcctttaaccagccccaactttctatgggaacttcactttcatctctttcttggaggccgtacccacttcccacatctcccatgctgctgagtgaaaggttctcatgattaaaacagaagaataagcaccatctccctgaccaaacctcccacgtgtctgcaggacacctagctctctctaacatcctaaaatataactgcttcaaaaggcgtcaacttggacacctacagcccttgccatcttgtgcaaattaagcccagaaaacacagctgggactccatccctcacctcatccaggcgcagatatcaccagcaggaaacagaaagccagaggcttttgtgcagccactttccttactaaagaacatctccttaaacacctgcctcccctgaattttctcatcgtatcagctcaaactgactgagaagagctgccagatctccgtcatacctctgaagtacccagctacataccagataaaaataaccaaaaaagaggaagcctatcagatgctcgatggttttgtcaacagaaagcagttctttcttggcaggtggccatggggtgcagccgccgcacaggctctccagggccttgtatccccaagctctgctagcagagttcccttagcaggcatggaaggttgcattttcaaagtggtccatcatctcccatcctctgtgcttttccccagtgtgatcttgacacttttcccactgagaggtgggtctgtgtcctctccacttgaagctgagtggtcttgagactcactttaacagaatgcagaagaaatgacaatgcccgacttctaagctagatcagaaaagatgctacagcttccccatgttcactggaacacttgggtctgcagccttgagccactatgtaaggccaagagccctaagagagccatgctca

SEQ ID NO: 3644 - DNA, 2001 bp, Homo sapiens
aaaaagcaacagactggcagtgagccacagtaagtaacctattacaattgtccaggggacaatggtgaatgacaaactcaagtactggggatggaaaggatgggacagtcagacagagtaattaatttcacatacacggagaaagagtggtccatgagtcctaggaaatctctctgacatcacatcacttacttgctctggctaagtccctgtatgtcaccaatctcacaggaatatactagcatttagtgagttcagcggggtttagtggtcccactcctcctacctctaggctaacattcacccacccactcttcccttccaacaggaactgaagcttctgcagccacaaacacctagaaacagggttccttcattttcagttgtagctaccaactcacatattactgactgctactaactagaccagatgcaattccacagttctggcatgctgagaacagccactccttgccaacgcggctcagtcctgcattcatttgggacatctctggcaagcccccaggtatcagtgcaatgcactttgcaatgtcagccaagggcatgcagcaaggaactcagggaatggcacaacctaagaatgacgtcagaggagacagaacggatagatgagcttcctggggctggctagtgtcttgatccttcagacaggcacccaggccttatgcaaagttttcagacaggctggttagttaacaagattgggatactagggtgatagtttgaaccaggccactcccaaacaactctggctggccataatgtgcatatgtgttctggggaacaagggaacaaatcagatgtattcatgtggaccagcactggagaaacaacccaaagcaccaggcttcctcataatgtgcccacatccatgcctgccgcatgacttaacagcatgaggtgtggatttctgctgccttgttgggctggaggatagaaggagacatgatagggaactaatatatttataggcctcctggaggcacagcacaattcatcagccttgaaaaatgactcctttaaccagccccaactttctatgggaacttcactttcatctctttcttggaggccgtacccacttcccacatctcccatgctgctgagtgaaaggttctcatgattaaaacagaagaataagcaccatctccctgaccaaacctcccacgtgtctgcaggacacctagctctctctaacatcctaaaatataactgcttcaaaaggcgtcaacttggacacctacagcccttgccatcttgtgcaaattaagcccagaaaacacagctgggactccatccctcacctcatccaggcgcagatatcaccagcaggaaacagaaagccagaggcttttgtgcagccactttccttactaaagaacatctccttaaacacctgcctcccctgaattttctcatcgtatcagctcaaactgactgagaagagctgccagatctccgtcatacctctgaagtacccagctacataccagataaaaataaccaaaaaagaggaagcctatcagatgctcgatggttttgtcaacagaaagcagttctttcttggcaggtggccatggggtgcagccgccgcacaggctctccagggccttgtatccccaagctctgctagcagagttcccttagcaggcatggaaggttgcattttcaaagtggtccatcatctcccatcctctgtgcttttccccagtgtgatcttgacacttttcccactgagaggtgggtctgtgtcctctccacttgaagctgagtggtcttgagactcactttaacagaatgcagaagaaatgacaatgcccgacttctaagctagatcagaaaagatgctacagcttccccatgttcactggaacacttgggtctgcagccttgagccactatgtaaggccaagagccctaagagagccatgctcatggacagactgcacatgggcactcccatcagcagtcctggcctcc

SEQ ID NO: 3645 - DNA, 19 bp, Homo sapiens
actccagcctgggaaacaa

SEQ ID NO: 3646 - DNA, 20 bp, Homo sapiens
tcgcagaagcttccatgtta

SEQ ID NO: 3647 - DNA, 139 bp, Homo sapiens
actccagcctgggaaacaagagcaaaactccgtctcaaaacaaaaaaaaatactaaaataaataaaataaaataaaaaacaaaaccacaacacaaacacaagtaagtacaagagcccaataacatggaagcttctgcga

SEQ ID NO: 3648 - DNA, 22 bp, Homo sapiens
caggagtccctccttatcttca

SEQ ID NO: 3649 - DNA, 20 bp, Homo sapiens
atctaccgcgcacttcatct

SEQ ID NO: 3650 - DNA, 308 bp, Homo sapiens
caggagtccctccttatcttcaggggacacattccaggatccccagtggatgccccaatccatggatagaaccctgtatatactgttttttcctatacattcatacctatgataaagtttaatttataaattaggcacagtaagagattaacactaacaataaaatagaacaactatactataagaaaagttttattaatgtggtttctctctctctctgaaaagatcttgttgtactgtattcgcccttcttgtgacgttatgagatgaaaaaatgggtacgtgatgagatgaagtgcgcggtagat

SEQ ID NO: 3651 - DNA, 1002 bp, Homo sapiens
ctctatcacacaactgtgccaataacagggagattattaacaatccactccaggattcccatctatctctcagcggggattcctatctctaagcacagggagccaggagtctactgcttaagaaataaaaaatgtttttattattcttttcttcctaaaaattgtaccacctagaagaatactgaacactgttatccttctacataacataccaaagaccgagttcatgttagtaaccaggaaaaacactgacttcaccccaaactttgaccttgggaccttacaaggaaattgtccccctggttcctcgaatggggtacagatcctgtttccactgttgtctgaaatactttggtcctagctggaaagcctggcagagtaacagtgttccattgtcgggctaaaagaaggaacactatcatgagcatcaggatgaccttaggcaagtcactcagcttctctagttcacaactgtaaggttccagtaagctctaatcatactctataagcaaaaaagaaagtcaagaatgaccagaatccaaaatctatcgctattttccctacccacagtccttttctccttcctcttatttattgtttttatttttagttttttggtttttcttggtactcactgattaaggcatcctccttcctcttggaccctgaaggttaacagaatgcagaaacaaaaacaaattttaagtgtccagatggcatgtacaccgtgaataaaacagcaggaggagatgaggtatatagataagaataggaaagccaaatataaagatgaaaacagttgtatctgcacactggaatctagcataactatttttttttcctttttcaatgatactttttcctgttatattgcctcataagccacatcagcttgcagtcacaaggatttgcagagaaagatcttaactataagatcagtcactggctgggcgcagtggctcacacctgtaatcctagcactttgggaggccaagacgggcg

SEQ ID NO: 3652 - DNA, 2001 bp, Homo sapiens
tgcttaagaaataaaaaatgtttttattattcttttcttcctaaaaattgtaccacctagaagaatactgaacactgttatccttctacataacataccaaagaccgagttcatgttagtaaccaggaaaaacactgacttcaccccaaactttgaccttgggaccttacaaggaaattgtccccctggttcctcgaatggggtacagatcctgtttccactgttgtctgaaatactttggtcctagctggaaagcctggcagagtaacagtgttccattgtcgggctaaaagaaggaacactatcatgagcatcaggatgaccttaggcaagtcactcagcttctctagttcacaactgtaaggttccagtaagctctaatcatatctataagcaaaaaagaaagtcaagaatgaccagaatccaaaatctatcgctattttccctacccacagtccttttctccttcctcttatttattgtttttatttttagttttttggtttttcttggtactcactgattaaggcatcctccttcctcttggaccctgaaggttaacagaatgcagaaacaaaaacaaattttaagtgtccagatggcatgtacaccgtgaataaaacagcaggaggagatgaggtatatagataagaataggaaagccaaatataaagatgaaaacagttgtatctgcacactggaatctagcataactatttttttttcctttttcaatgatactttttcctgttatattgcctcataagccacatcagcttgcagtcacaaggatttgcagagaaagatcttaactataagatcagtcactggctgggcgcagtggctcacacctgtaatcctagcactttgggaggccaagacgggcggatcacaaggtcaggagtttgagaccagcctggccaacatagtgaaaccccgtctctactaaaaatacaaaaaactagctgggtgtggtggcgggcacctgtaatcctagctactcgggaggctgaggcaggagaatcacttgaacctcagaggcagaggttgcagcaagccgagatggcaccactgcacaccagctcgggcaacagtacaagactctgtctcaaaaaaaaaaaaaaaaagatcggtcattgccagcatcctgatgcccacctgctgcaatgggccccactcccaaacctgctccaagggatggatggacagtcagtaccttcacagctgggcaattccaaagacacacattgggcttctgactttacaagctactccaaggaacaccttcctctagggtcccaagcccctgagaagtttatgaaatagatatataaaagcaaaggcttgaagagaacaaacaaagctcattcagtaaaagtgttttgagtccatccagaaaggaactagggacaaaaaaaaacacacaaacaaaacaagattttttggttggccacattggaattgccaccaaacacctgggctgctacatgcgaagtcctatactagggatgatgtgaggggagacagagatggggggagcaagggaagacgaagggatgaaaaacagcaacacctctgctgtccagaattctattgggatttctatgttttcatagaaaaaaagttatcagagacaaaaagatacttaatcgcatttgcctctaagaagtaaacttagggtttgggagggaaggacagagacttttcttttttctctctctttttctggagacagacttttctttgtatttcaattttgtcctatttttacccatgtgtatccactacattttgaattttttaaattctacagtacaactggaaagaatatgactaaaacaatgaaaatgcaagtacaagacaaaagataccacccaaaaatataatcaccaattgtgatctaaatactaagggaataagtgtagcagatggaattataattaaaatggtcaatatactgggtgcttattacgtgccaggcactcctaagaacttcaccta

SEQ ID NO: 3653 - DNA, 2001 bp, Homo sapiens
ttaaggcatcctccttcctcttggaccctgaaggttaacagaatgcagaaacaaaaacaaattttaagtgtccagatggcatgtacaccgtgaataaaacagcaggaggagatgaggtatatagataagaataggaaagccaaatataaagatgaaaacagttgtatctgcacactggaatctagcataactatttttttttcctttttcaatgatactttttcctgttatattgcctcataagccacatcagcttgcagtcacaaggatttgcagagaaagatcttaactataagatcagtcactggctgggcgcagtggctcacacctgtaatcctagcactttgggaggccaagacgggcggatcacaaggtcaggagtttgagaccagcctggccaacatagtgaaaccccgtctctactaaaaatacaaaaaactagctgggtgtggtggcgggcacctgtaatcctagctactcgggaggctgaggcaggagaatcacttgaacctcagaggcagaggttgcagcaagccgagatggcaccactgcacaccagctcgggcaacagtacaagactctgtctcaaaaaaaaaaaaaaaaagatcggtcattgccagcatcctgatgcccacctgctgcaatgggccccactcccaaacctgctccaagggatggatggacagtcagtaccttcacagctgggcaattccaaagacacacattgggcttctgactttacaagctactccaaggaacaccttcctctagggtcccaagcccctgagaagtttatgaaatagatatataaaagcaaaggcttgaagagaacaaacaaagctcattcagtaaaagtgttttgagtccatccagaaaggaactagggacaaaaaaaaacacacaaacaaaacaagattttttggttggccacattggaattgccaccaaacacctgggctgctacatgcgaagtcctatactagggatgatgtgaggggagacagagatggggggagcaagggaagacgaagggatgaaaaacagcaacacctctgctgtccagaattctattgggatttctatgttttcatagaaaaaaagttatcagagacaaaaagatacttaatcgcatttgcctctaagaagtaaacttagggtttgggagggaaggacagagacttttcttttttctctctctttttctggagacagacttttctttgtatttcaattttgtcctatttttacccatgtgtatccactacattttgaattttttaaattctacagtacaactggaaagaatatgactaaaacaatgaaaatgcaagtacaagacaaaagataccacccaaaaatataatcaccaattgtgatctaaatactaagggaataagtgtagcagatggaattataattaaaatggtcaatatactgggtgcttattacgtgccaggcactcctaagaacttcacctagatgatcttatttaatcctcacttctaccccgtaagatgagatcggtggtattatcattattcccgctttacatctgcaaaagctaagccacagagggtgtatcatttgctcaaggtccttagctagcaagtaacagagccaggtaagactcaaatccagtttcacccacagttcacatgggctcatccccaaaagaagagagggttcacatcctaaatgagggctctaaaggagaagaggtgtggtgttgtttggagaatgtctatgcgggaaggaggtatgtatgggaaagacacagtgctagaatctgtgattatcaaaactataaacatttcttaaggacctactaagtgctggacacaaccagatttagagagtagctgtaggaaacaaagctcttatacagagatgaaaaagggccagacatgctccgtttaccttccaaaacaagaccacaaaactcaaaataaaatctcttcaatccaccctgaatactccagagtcttaaatgacactgtgtaa

SEQ ID NO: 3654 - DNA, 2001 bp, Homo sapiens
ccctgaaggttaacagaatgcagaaacaaaaacaaattttaagtgtccagatggcatgtacaccgtgaataaaacagcaggaggagatgaggtatatagataagaataggaaagccaaatataaagatgaaaacagttgtatctgcacactggaatctagcataactatttttttttcctttttcaatgatactttttcctgttatattgcctcataagccacatcagcttgcagtcacaaggatttgcagagaaagatcttaactataagatcagtcactggctgggcgcagtggctcacacctgtaatcctagcactttgggaggccaagacgggcggatcacaaggtcaggagtttgagaccagcctggccaacatagtgaaaccccgtctctactaaaaatacaaaaaactagctgggtgtggtggcgggcacctgtaatcctagctactcgggaggctgaggcaggagaatcacttgaacctcagaggcagaggttgcagcaagccgagatggcaccactgcacaccagctcgggcaacagtacaagactctgtctcaaaaaaaaaaaaaaaaagatcggtcattgccagcatcctgatgcccacctgctgcaatgggccccactcccaaacctgctccaagggatggatggacagtcagtaccttcacagctgggcaattccaaagacacacattgggcttctgactttacaagctactccaaggaacaccttcctctagggtcccaagcccctgagaagtttatgaaatagatatataaaagcaaaggcttgaagagaacaaacaaagctcattcagtaaaagtgttttgagtccatccagaaaggaactagggacaaaaaaaaacacacaaacaaaacaagattttttggttggccacattggaattgccaccaaacacctgggctgctacatgcgaagtcctatactagggatgatgtgaggggagacagagatggggggagcaagggaagacgaagggatgaaaaacagcaacacctctgctgtccagaattctattgggatttctatgttttcatagaaaaaaagttatcagagacaaaaagatacttaatcgcatttgcctctaagaagtaaacttagggtttgggagggaaggacagagacttttcttttttctctctctttttctggagacagacttttctttgtatttcaattttgtcctatttttacccatgtgtatccactacattttgaattttttaaattctacagtacaactggaaagaatatgactaaaacaatgaaaatgcaagtacaagacaaaagataccacccaaaaatataatcaccaattgtgatctaaatactaagggaataagtgtagcagatggaattataattaaaatggtcaatatactgggtgcttattacgtgccaggcactcctaagaacttcacctagatgatcttatttaatcctcacttctaccccgtaagatgagatcggtggtattatcattattcccgctttacatctgcaaaagctaagccacagagggtgtatcatttgctcaaggtccttagctagcaagtaacagagccaggtaagactcaaatccagtttcacccacagttcacatgggctcatccccaaaagaagagagggttcacatcctaaatgagggctctaaaggagaagaggtgtggtgttgtttggagaatgtctatgcgggaaggaggtatgtatgggaaagacacagtgctagaatctgtgattatcaaaactataaacatttcttaaggacctactaagtgctggacacaaccagatttagagagtagctgtaggaaacaaagctcttatacagagatgaaaaagggccagacatgctccgtttaccttccaaaacaagaccacaaaactcaaaataaaatctcttcaatccaccctgaatactccagagtcttaaatgacactgtgtaacaagaaagctaagttgacataggga

SEQ ID NO: 3655 - DNA, 2001 bp, Homo sapiens
attttaagtgtccagatggcatgtacaccgtgaataaaacagcaggaggagatgaggtatatagataagaataggaaagccaaatataaagatgaaaacagttgtatctgcacactggaatctagcataactatttttttttcctttttcaatgatactttttcctgttatattgcctcataagccacatcagcttgcagtcacaaggatttgcagagaaagatcttaactataagatcagtcactggctgggcgcagtggctcacacctgtaatcctagcactttgggaggccaagacgggcggatcacaaggtcaggagtttgagaccagcctggccaacatagtgaaaccccgtctctactaaaaatacaaaaaactagctgggtgtggtggcgggcacctgtaatcctagctactcgggaggctgaggcaggagaatcacttgaacctcagaggcagaggttgcagcaagccgagatggcaccactgcacaccagctcgggcaacagtacaagactctgtctcaaaaaaaaaaaaaaaaagatcggtcattgccagcatcctgatgcccacctgctgcaatgggccccactcccaaacctgctccaagggatggatggacagtcagtaccttcacagctgggcaattccaaagacacacattgggcttctgactttacaagctactccaaggaacaccttcctctagggtcccaagcccctgagaagtttatgaaatagatatataaaagcaaaggcttgaagagaacaaacaaagctcattcagtaaaagtgttttgagtccatccagaaaggaactagggacaaaaaaaaacacacaaacaaaacaagattttttggttggccacattggaattgccaccaaacacctgggctgctacatgcgaagtcctatactagggatgatgtgaggggagacagagatggggggagcaagggaagacgaagggatgaaaaacagcaacacctctgctgtcaagaattctattgggatttctatgttttcatagaaaaaaagttatcagagacaaaaagatacttaatcgcatttgcctctaagaagtaaacttagggtttgggagggaaggacagagacttttcttttttctctctctttttctggagacagacttttctttgtatttcaattttgtcctatttttacccatgtgtatccactacattttgaattttttaaattctacagtacaactggaaagaatatgactaaaacaatgaaaatgcaagtacaagacaaaagataccacccaaaaatataatcaccaattgtgatctaaatactaagggaataagtgtagcagatggaattataattaaaatggtcaatatactgggtgcttattacgtgccaggcactcctaagaacttcacctagatgatcttatttaatcctcacttctaccccgtaagatgagatcggtggtattatcattattcccgctttacatctgcaaaagctaagccacagagggtgtatcatttgctcaaggtccttagctagcaagtaacagagccaggtaagactcaaatccagtttcacccacagttcacatgggctcatccccaaaagaagagagggttcacatcctaaatgagggctctaaaggagaagaggtgtggtgttgtttggagaatgtctatgcgggaaggaggtatgtatgggaaagacacagtgctagaatctgtgattatcaaaactataaacatttcttaaggacctactaagtgctggacacaaccagatttagagagtagctgtaggaaacaaagctcttatacagagatgaaaaagggccagacatgctccgtttaccttccaaaacaagaccacaaaactcaaaataaaatctcttcaatccaccctgaatactccagagtcttaaatgacactgtgtaacaagaaagctaagttgacatagggaggccaggagaagatgtgaaaaaagcagactaatgc

SEQ ID NO: 3656 - DNA, 2001 bp, Homo sapiens
agtggctcacacctgtaatcctagcactttgggaggccaagacgggcggatcacaaggtcaggagtttgagaccagcctggccaacatagtgaaaccccgtctctactaaaaatacaaaaaactagctgggtgtggtggcgggcacctgtaatcctagctactcgggaggctgaggcaggagaatcacttgaacctcagaggcagaggttgcagcaagccgagatggcaccactgcacaccagctcgggcaacagtacaagactctgtctcaaaaaaaaaaaaaaaaagatcggtcattgccagcatcctgatgcccacctgctgcaatgggccccactcccaaacctgctccaagggatggatggacagtcagtaccttcacagctgggcaattccaaagacacacattgggcttctgactttacaagctactccaaggaacaccttcctctagggtcccaagcccctgagaagtttatgaaatagatatataaaagcaaaggcttgaagagaacaaacaaagctcattcagtaaaagtgttttgagtccatccagaaaggaactagggacaaaaaaaaacacacaaacaaaacaagattttttggttggccacattggaattgccaccaaacacctgggctgctacatgcgaagtcctatactagggatgatgtgaggggagacagagatggggggagcaagggaagacgaagggatgaaaaacagcaacacctctgctgtccagaattctattgggatttctatgttttcatagaaaaaaagttatcagagacaaaaagatacttaatcgcatttgcctctaagaagtaaacttagggtttgggagggaaggacagagacttttcttttttctctctctttttctggagacagacttttctttgtatttcaattttgtcctatttttacccatgtgtatccactacattttgaattttttaaattctacagtacaactggaaagaatatgactaaaacaatgaaaatgcaagtacaagacaaaagataccacccaaaaatataatcaccaattgtgatctaaatactaagggaataagtgtagcagatggaattataattaaaatggtcaatatactgggtgcttattacgtgccaggcactcctaagaacttcacctagatgatcttatttaatcctcacttctaccccgtaagatgagatcggtggtattatcattattcccgctttacatctgcaaaagctaagccacagagggtgtatcatttgctcaaggtccttagctagcaagtaacagagccaggtaagactcaaatccagtttcacccacagttcacatgggctcatccccaaaagaagagagggttcacatcctaaatgagggctctaaaggagaagaggtgtggtgttgtttggagaatgtctatgcgggaaggaggtatgtatgggaaagacacagtgctagaatctgtgattatcaaaactataaacatttcttaaggacctactaagtgctggacacaaccagatttagagagtagctgtaggaaacaaagctcttatacagagatgaaaaagggccagacatgctccgtttaccttccaaaacaagaccacaaaactcaaaataaaatctcttcaatccaccctgaatactccagagtcttaaatgacactgtgtaacaagaaagctaagttgacatagggaggccaggagaagatgtgaaaaaagcagactaatgcagcagagaagggagggaaataaatatattgccttcctcctggggcaaaagcattttaattatcaactgagagtccagcagagccataaaactggccagctgtcccattcaatcaagccaaaggctgtaacagacaggacgaggctgcatttttcagaggaccaagcacttcgagttaaggctgagtccagagggttcaagacgcacgggccgtttccacaagaggcttttgcacagttagaaggggctggtggggc

SEQ ID NO: 3657 - DNA, 2001 bp, Homo sapiens
aaagggaaaggcaaggttcccaaaccacgttcaagaactgaaagatgcaacaggacttgcaagtcagatctccggcctcaatggtttcttctgctgagtcctgttcacccggctggttatttgcttcatttcagctttattcacttacgtatttattttggcttgcagaacatatctctgtattcataggaaacgctacccatcaactgaacaggatgctctgagacacgccaggtggctgctagctaacctctggcatagcctcctgcaaccaaaagataaatccaattctctgagcgcttgtacacttttgcctgggaaaatcctcaaaacacatccatcatcctccaactctctgttaagaaggaacatgtggcaaaaaccaccaaaggacctgactaaggaaaaaaacagggagtgaaattcagaagtacctgagccaggtaatgccagaagtatttcatttggagaggcctccatgaagcatacaaaaagtcatttacttacctctcaaaaaggaccaagacttgggttttccagatgatacttcactgccttccaggtccactctgggaatgttttcctgcctatttcattctcttgtaggaaaaaactgcttttacagctactcctcatcctttttcgaggcaagtctaatgccacatcatccctgaccagggtgcctgagccttagctgcttcctccatcaggcagaatgggctctaccatgcgtgcaggacgacactagagactgggatccagtgggtcccagggtgccacaggtctggcagccagcaaactcaccagccatgagaaatcccacacaggaaaaccagtcaggagctttggctagtgtgtggtccaggtatactccagggcttagaatgttagagcctgctgagctgaggccaatgggaagacaaaatctctatcatcctcacactggtgaaagcatgtcttcagcttcctgaccttgtgaactccaagagaaggttggagacgaggacaaggtgcaagtgaacagaatttggagagggagatgctacatggacctccagttccaacaggagcagccaatccaacaattcaacaaaactggaacaggcaccatgaggagcgtgacaggcagtccccaagttgggaacaaagggagtactgaggttggacagaacagactgggagtagacccgacagcaccgggcagtggtcggctccagcagctcctagcagccggcaactggctacagtggagacgtgggccagtgagttagccagggctggtgatcaggaaaagtgtgaagaggggaggaggcagaggcgtttgggattaataacgaatgtactgtcacaacaccacactccagcatccaaaacaggtggttgggctcagacaattaagatggatcaagggccaggggactctaacgaggatgaaaagcaaattccatatggccgggcctggtggctcacgcctgtaattccaacagtttgggagaccaaagcaggtggattgcttgagcccaggagttcaagaccagcctgggcaacacggcgagaccctgtctctactaaataaaaaataaaataaataaataaataaataattccacacaagtgaggtctgaatgacacccatgggtaagagaaagggaacatttacattttgggatcacgtaagtaaaccagttcacatgatatttcattcattcattcattcattcattcattccttttatctatacatttattgaggaccctactatgcacctggaactatgctgggagctaaagacacaaaacctatttggagatgtaagggatgctcctgaaatcatagccaaaaaaagaggccaggttgtgtaacttggcaggttggcttacaggccagcacggtgttttgtttcgttatggcctatgaatgcctaccagtgctttaaactgactcaccctggctggatggcagttgaacttgcagccattagaccaggggttctagtctct

SEQ ID NO: 3658 - DNA, 801 bp, Homo sapiens
atgagaaatcccacacaggaaaaccagtcaggagctttggctagtgtgtggtccaggtatactccagggcttagaatgttagagcctgctgagctgaggccaatgggaagacaaaatctctatcatcctcacactggtgaaagcatgtcttcagcttcctgaccttgtgaactccaagagaaggttggagacgaggacaaggtgcaagtgaacagaatttggagagggagatgctacatggacctccagttccaacaggagcagccaatccaacaattcaacaaaactggaacaggcaccatgaggagcgtgacaggcagtccccaagttgggaacaaagggagtactgaggttggacagaacagactgggagtagacccgacagcaccgggcagtggtcggctccagcagctcctagcagccggcaactggctacagtggagacgtgggccagtgagttagccagggctggtgatcaggaaaagtgtgaagaggggaggaggcagaggcgtttgggattaataacgaatgtactgtcacaacaccacactccagcatccaaaacaggtggttgggctcagacaattaagatggatcaagggccaggggactctaacgaggatgaaaagcaaattccatatggccgggcctggtggctcacgcctgtaattccaacagtttgggagaccaaagcaggtggattgcttgagcccaggagttcaagaccagcctgggcaacacggcgagaccctgtctctactaaataaaaaataaaataaataaataaataaataattccac

SEQ ID NO: 3659 - DNA, 20 bp, Homo sapiens
ctggctacagtggagacgtg

SEQ ID NO: 3660 - DNA, 21 bp, Homo sapiens
tcagacctcacttgtgtggaa

SEQ ID NO: 3661 - DNA, 388 bp, Homo sapiens
ctggctacagtggagacgtgggccagtgagttagccagggctggtgatcaggaaaagtgtgaagaggggaggaggcagaggcgtttgggattaataacgaatgtactgtcacaacaccacactccagcatccaaaacaggtggttgggctcagacaattaagatggatcaagggccaggggactctaacgaggatgaaaagcaaattccatatggccgggcctggtggctcacgcctgtaattccaacagtttgggagaccaaagcaggtggattgcttgagcccaggagttcaagaccagcctgggcaacacggcgagaccctgtctctactaaataaaaaataaaataaataaataaataaataattccacacaagtgaggtctga

SEQ ID NO: 3662 - DNA, 20 bp, Homo sapiens
agttagccagggctggtgat

SEQ ID NO: 3663 - DNA, 21 bp, Homo sapiens
tcagacctcacttgtgtggaa

SEQ ID NO: 3664 - DNA, 360 bp, Homo sapiens
agttagccagggctggtgatcaggaaaagtgtgaagaggggaggaggcagaggcgtttgggattaataacgaatgtactgtcacaacaccacactccagcatccaaaacaggtggttgggctcagacaattaagatggatcaagggccaggggactctaacgaggatgaaaagcaaattccatatggccgggcctggtggctcacgcctgtaattccaacagtttgggagaccaaagcaggtggattgcttgagcccaggagttcaagaccagcctgggcaacacggcgagaccctgtctctactaaataaaaaataaaataaataaataaataaataattccacacaagtgaggtctga

SEQ ID NO: 3665 - DNA, 20 bp, Homo sapiens
caacaccacactccagcatc

SEQ ID NO: 3666 - DNA, 21 bp, Homo sapiens
tcagacctcacttgtgtggaa

SEQ ID NO: 3667 - DNA, 277 bp, Homo sapiens
caacaccacactccagcatccaaaacaggtggttgggctcagacaattaagatggatcaagggccaggggactctaacgaggatgaaaagcaaattccatatggccgggcctggtggctcacgcctgtaattccaacagtttgggagaccaaagcaggtggattgcttgagcccaggagttcaagaccagcctgggcaacacggcgagaccctgtctctactaaataaaaaataaaataaataaataaataaataattccacacaagtgaggtctga

SEQ ID NO: 3668 - DNA, 20 bp, Homo sapiens
tggttgggctcagacaatta

SEQ ID NO: 3669 - DNA, 21 bp, Homo sapiens
tcagacctcacttgtgtggaa

SEQ ID NO: 3670 - DNA, 248 bp, Homo sapiens
tggttgggctcagacaattaagatggatcaagggccaggggactctaacgaggatgaaaagcaaattccatatggccgggcctggtggctcacgcctgtaattccaacagtttgggagaccaaagcaggtggattgcttgagcccaggagttcaagaccagcctgggcaacacggcgagaccctgtctctactaaataaaaaataaaataaataaataaataaataattccacacaagtgaggtctga

SEQ ID NO: 3671 - DNA, 19 bp, Homo sapiens
agggccaggggactctaac

SEQ ID NO: 3672 - DNA, 20 bp, Homo sapiens
cccatgggtgtcattcagac

SEQ ID NO: 3673 - DNA, 232 bp, Homo sapiens
agggccaggggactctaacgaggatgaaaagcaaattccatatggccgggcctggtggctcacgcctgtaattccaacagtttgggagaccaaagcaggtggattgcttgagcccaggagttcaagaccagcctgggcaacacggcgagaccctgtctctactaaataaaaaataaaataaataaataaataaataattccacacaagtgaggtctgaatgacacccatggg

SEQ ID NO: 3674 - DNA, 2001 bp, Homo sapiens
gaaattcagaagtacctgagccaggtaatgccagaagtatttcatttggagaggcctccatgaagcatacaaaaagtcatttacttacctctcaaaaaggaccaagacttgggttttccagatgatacttcactgccttccaggtccactctgggaatgttttcctgcctatttcattctcttgtaggaaaaaactgcttttacagctactcctcatcctttttcgaggcaagtctaatgccacatcatccctgaccagggtgcctgagccttagctgcttcctccatcaggcagaatgggctctaccatgcgtgcaggacgacactagagactgggatccagtgggtcccagggtgccacaggtctggcagccagcaaactcaccagccatgagaaatcccacacaggaaaaccagtcaggagctttggctagtgtgtggtccaggtatactccagggcttagaatgttagagcctgctgagctgaggccaatgggaagacaaaatctctatcatcctcacactggtgaaagcatgtcttcagcttcctgaccttgtgaactccaagagaaggttggagacgaggacaaggtgcaagtgaacagaatttggagagggagatgctacatggacctccagttccaacaggagcagccaatccaacaattcaacaaaactggaacaggcaccatgaggagcgtgacaggcagtccccaagttgggaacaaagggagtactgaggttggacagaacagactgggagtagacccgacagcaccgggcagtggtcggctccagcagctcctagcagccggcaactggctacagtggagacgtgggccagtgagttagccagggctggtgatcaggaaaagtgtgaagaggggaggaggcagaggcgtttgggattaataacgaatgtactgtcacaacaccacactccagcatccaaaacaggtggttgggctcagacaattaagatggatcaagggccaggggactctaacgaggatgaaaagcaaattccatatggccgggcctggtggctcacgcctgtaattccaacagtttgggagaccaaagcaggtggattgcttgagcccaggagttcaagaccagcctgggcaacacggcgagaccctgtctctactaaataaaaaataaaataaataaataaataaataattccacacaagtgaggtctgaatgacacccatgggtaagagaaagggaacatttacattttgggatcacgtaagtaaaccagttcacatgatatttcattcattcattcattcattcattcattccttttatctatacatttattgaggaccctactatgcacctggaactatgctgggagctaaagacacaaaacctatttggagatgtaagggatgctcctgaaatcatagccaaaaaaagaggccaggttgtgtaacttggcaggttggcttacaggccagcacggtgttttgtttcgttatggcctatgaatgcctaccagtgctttaaactgactcaccctggctggatggcagttgaacttgcagccattagaccaggggttctagtctcttgtcactccaatattcttctacgaactaccaggtagtacacattcatcaaatgatgacttagcactgactacagcaaggatatgtgatgggctaccagaagcagccaggtttgaactgagcacagaaaactgcggaagggttggacaggcagagagatgaggcgagggcacccctgccagcaaggaggaaaggggagaccagcttggctaaagaagaaagtgcctctagaagaagagaaggcagcaaagatctcatgatcatttaagctgacatctgaaaagaggaagacaggtgtgcctagccccaaaccaaatacagttcaccactcacctctgctctttcagctataaagttaagaatgagttggttgaaacccaaagaaggtacaggcaggggataaatcaaacattaatgcaaa

SEQ ID NO: 3675 - DNA, 20 bp, Homo sapiens
ttccaacagtttgggagacc

SEQ ID NO: 3676 - DNA, 21 bp, Homo sapiens
tgggtgtcattcagacctcac

SEQ ID NO: 3677 - DNA, 157 bp, Homo sapiens
ttccaacagtttgggagaccaaagcaggtggattgcttgagcccaggagttcaagaccagcctgggcaacacggcgagaccctgtctctactaaataaaaaataaaataaataaataaataaataattccacacaagtgaggtctgaatgacaccca

SEQ ID NO: 3678 - DNA, 22 bp, Homo sapiens
catgggtaagagaaagggaaca

SEQ ID NO: 3679 - DNA, 20 bp, Homo sapiens
agctcccagcatagttccag

SEQ ID NO: 3680 - DNA, 154 bp, Homo sapiens; identical to SEQ ID NO: 27

SEQ ID NO: 3681 - DNA, 22 bp, Homo sapiens
catgggtaagagaaagggaaca

SEQ ID NO: 3682 - DNA, 20 bp, Homo sapiens
agctcccagcatagttccag

SEQ ID NO: 3683 - DNA, 154 bp, Homo sapiens; identical to SEQ ID NO: 27

SEQ ID NO: 3684 - DNA, 23 bp, Homo sapiens
tgggatcacgtaagtaaaccagt

SEQ ID NO: 3685 - DNA, 20 bp, Homo sapiens
agctcccagcatagttccag

SEQ ID NO: 3686 - DNA, 123 bp, Homo sapiens
tgggatcacgtaagtaaaccagttcacatgatatttcattcattcattcattcattcattcattccttttatctatacatttattgaggaccctactatgcacctggaactatgctgggagct

SEQ ID NO: 3687 - DNA, 2001 bp, Homo sapiens
caaactcctaggctcaagagatccgcccacctcagcctcccaaagtgctgggattacaggcttaagccactgtgcccagcccttttctgcattttctaagagaaggaaagagttatttaatatgaatataaaagtaatgagaataccttcactttcaatgtttttactttccaaagctttttcatattacttgaatattgatatctttacttatttaacttttttcattcttttttctttttttttttaacagagtctgtctctgtcacccaggctggagtgcagtggcacaatcttagctcaccgcaatctctgcctcccgggttcaaatgattctgcctcagcctcccgagtagctgggattacaggcgcccaccaccaccccaggctaatttttgtattttagtagagatggggtttcaccatgttggccagactggtcttgaactcccgacctcgggtgatcctcctccctcagcctcccaaagtgctgggattacaggcgtgagccaccacacctggccacttatataacttttaatggccactattaaactgctcttctgcccaatgccgttacaccaagccacctactatacaaaatcctgaagtcatctacctgcccccaaaaggacaacctttccatttaagaccatctttcaacaacgtgtttgctaactatcatgtaactggttttccccaatttgatggagaagagacacataaatccatttttatagccagaggctttttacaagtagttttagggcgtgatgcttaagttaatgatgtgatgtggtaaagtagtataaaccagtagttaagccaggggtctgagccacacgtcccagggcctggctaaacttgtttggctgtatgatgctagacatctgaggtaacagttcataccgatgcatgtcctgcattaagattccatggtaagactgctagctgccaattccttagcggcaatgcccttccttgataacagatcctgattctcagctgggttcaatgacacccagcataaaagcctccatctccctgtctcctctccagcgagtgatggccaggcgaccacactctgtccaattaacacaagcacatacgccatgctggacttccgggagattaatgggagccaactcagccacatggggcaccttttctgtgcttctgcttcccctcatccttcaggcctgtgacttggacctcataactggcagtccagcagccatctggaccacagggtgacaatgaggatggaagccaagtactgggatgagggagtgaaaaataggagcctgggtcccagatgacaatatggagctgccctaaaatcctccgggcttcttttcaaagacaagtcagtgtagaccttgtttagccgctgttatttggtttggcttttcgggctacgtacggtcaatctaaactcaatgcagattctgtatcaacataggatactatatgccatacgcgtttcactgccagtaaactgcaaatgactttttaaagtagatgaccaagataataaaacattttaataagacactttttactgaacctttctaacagctaggggtttatcatcaactgctttctctttcccacaaagacagctcctgtgtatacatactcttttctcgaatggtcaaagtcaactaacacatataattcctagtattctgccctcacatgacaatgaccaaaatccaattctctggaacccttaacaaagcaaggaaaacaaaccagtgttcccaagtctataaaatacaaagaagttatggctcccaagctggaggcaatgggcaaagaagtggcataacacttctaagataattttaagcctgggccacaaagcaagactcccatctctattaaaataataataataataataataaaattttttaaaaaaaggcttggtgcactggctcacgcctgtagtcccagaactttgagagactgaggcaggtggatcacctgaggtcagga

SEQ ID NO: 3688 - DNA, 1002 bp, Homo sapiens
gaattatatgtgttagttgactttgaccattcgagaaaagagtatgtatacacaggagctgtctttgtgggaaagagaaagcagttgatgataaacccctagctgttagaaaggttcagtaaaaagtgtcttattaaaatgttttattatcttggtcatctactttaaaaagtcatttgcagtttactggcagtgaaacgcgtatggcatatagtatcctatgttgatacagaatctgcattgagtttagattgaccgtacgtagcccgaaaagccaaaccaaataacagcggctaaacaaggtctacactgacttgtctttgaaaagaagcccggaggattttagggcagctccatattgtcatctgggacccaggctcctatttttcactccctcatcccagtacttggcttccatcctcattgtcaccctgtggtccagatggctgctggactgccagttatgaggtccaagtcacaggcctgaaggatgaggggaaagcagaagcacagaaaaggtgccccatgtggctgagttggctcccattaatctcccggaagtccagcatggcgtatgtgcttgtgttaattggacagagtgtggtcgcctggccatcactcgctggagaggagacagggagatggaggcttttatgctgggtgtcattgaacccagctgagaatcaggatctgttatcaaggaagggcattgccgctaaggaattggcagctagcagtcttaccatggaatcttaatgcaggacatgcatcggtatgaactgttacctcagatgtctagcatcatacagccaaacaagtttagccaggccctgggacgtgtggctcagacccctggcttaactactggtttatactactttaccacatcacatcattaacttaagcatcacgccctaaaactacttgtaaaaagcctctggctataaaaatggatttatgtgtctcttctccatcaaattggggaaaaccagttacatgata

SEQ ID NO: 3689 - DNA, 20 bp, Homo sapiens
atgggcaaagaagtggcata

SEQ ID NO: 3690 - DNA, 20 bp, Homo sapiens
tacaggagactgccaccaca

SEQ ID NO: 3691 - DNA, 277 bp, Homo sapiens; identical to SEQ ID NO: 38

SEQ ID NO: 3692 - DNA, 21 bp, Homo sapiens
cacaaagcaagactcccatct

SEQ ID NO: 3693 - DNA, 20 bp, Homo sapiens
gcctcgatgataccaccatt

SEQ ID NO: 3694 - DNA, 425 bp, Homo sapiens
cacaaagcaagactcccatctctattaaaataataataataataataataaaattttttaaaaaaaggcttggtgcactggctcacgcctgtagtcccagaactttgagagactgaggcaggtggatcacctgaggtcaggagttcgagaccaggctggccaacatggcgaaaccccacctctactaaaaatacaaaaattagccaggtgtggtggcagtctcctgtaatcccagctactcaggaggccgaggcaggagaattacttgaacctgggaggcggcggttgcaaagatcacaccactgcactccagcccgggtgacaaagtgagaccctgtctctaaaaaaaataaataaataaaatacaatcattttcaagtcatgtacacattgcaatggagtaagaatggtggtatcatcgaggc

SEQ ID NO: 3695 - DNA, 20 bp, Homo sapiens
tgcaaagatcacaccactgc

SEQ ID NO: 3696 - DNA, 20 bp, Homo sapiens
ggatgtttgccaaggattgt

SEQ ID NO: 3697 - DNA, 174 bp, Homo sapiens
tgcaaagatcacaccactgcactccagcccgggtgacaaagtgagaccctgtctctaaaaaaaataaataaataaaatacaatcattttcaagtcatgtacacattgcaatggagtaagaatggtggtatcatcgaggctcatattagacgtatacaatccttggcaaacatcc

SEQ ID NO: 3698 - DNA, 22 bp, Homo sapiens
ggagacagaaaggcccagtaaa

SEQ ID NO: 3699 - DNA, 22 bp, Homo sapiens
tccattcaaggatggaatgtgt

SEQ ID NO: 3700 - DNA, 674 bp, Homo sapiens
ggagacagaaaggcccagtaaacagacaacttgccgtgtttacccactcaggtaaatgaaaggttaaatacgatgttttcaagatgtttttgacttgcttctttttttcttccctttctcagtgttagaaattgattttgcggagctcaccttggaagagattattggcatcgggggctttgggaaggtctatcgtgctttctggataggggatgaggttgctgtgaaagcagctcgccacgaccctgatgaggacatcagccagaccatagagaatgttcgccaagaggccaagctcttcgccatgctgaagcaccccaacatcattgccctaagaggggtatgtctgaaggagcccaacctctgcttggtcatggagtttgctcgtggaggacctttgaatagagtgttatctgggaaaaggattcccccagacatcctggtgaattgggctgtgcagattgccagagggatgaactacttacatgatgaggcaattgttcccatcatccaccgcgaccttaagtccagcaacagtgagtatgaagagatggggctggaggggctcagagcagttgcagttgtatcccacgacgtcagtaggagtggacttctaatggaaccttagagggcagtgaaactccttgcttaaacacattccatccttgaatgga

SEQ ID NO: 3701 - DNA, 2001 bp, Homo sapiens
caccactgagtacacagtaaagctgagtaagtctcaaagaaaggatctcggccaggtgcagtggctcatgcctgtaatcccagcactttgggaggccgaggctggaggattgcttgagctcaggcattcaagaccagcctgggcaacatggcaaaaccccatctctatatttaaatgtattttaaaggaagaaagaaaagaaaaaaaaggacctctcccatattccctttagtgacaatagttggttttggtacaggattctgcatgattttccaggtgggattttttttcatgaatgtttatagaatgcctaccatgtggtgactgtcactaaggaaaatgcaaaggaaaataagttgattgcagttcctgcccttatggaatttgctttataatggggagacagaaaggcccagtaaacagacaacttgccgtgtttacccactcaggtaaatgaaaggttaaatacgatgttttcaagatgtttttgacttgcttctttttttcttccctttctcagtgttagaaattgattttgcggagctcaccttggaagagattattggcatcgggggctttgggaaggtctatcgtgctttctggataggggatgaggttgctgtgaaagcagctcgccacgaccctgatgaggacatcagccagaccatagagaatgttcgccaagaggccaagctcttcgccatgctgaagcaccccaacatcattgccctaagaggggtatgtctgaaggagcccaacctctgcttggtcatggagtttgctcgtggaggacctttgaatagagtgttatctgggaaaaggattcccccagacatcctggtgaattgggctgtgcagattgccagagggatgaactacttacatgatgaggcaattgttcccatcatccaccgcgaccttaagtccagcaacagtgagtatgaagagatggggctggaggggctcagagcagttgcagttgtatcccacgacgtcagtaagagtggacttctaatggaaccttagagggcagtgaaactccttgcttaaacacattccatccttgaatggagatgtaggaggtgagatgagtgccaagaaagattggtttaggaagagaggaaagaggcgcctgaggagtttgggataattttgagcttttttttttagcagtctagagtggccttccctactatttttccacatatcagaatgtgtaattctgatatgctgtgcacaaaacttgtgggaagtgtgaatattatcacaaaagggattttcctctttgtggaacaagaggtagagcaagcctttattatctgtttgaatgtttacctaaacacctcaacttgagatacccatcacagaagggactgtaagaagagaatgctattctttaaactgtgagctgattcaggtggtgatgtccatttggagagcatgacttcctggtaatatcaccaacctcctggtagcccaagggtggtattaattaaatgccataattacctagtgtttaatagcagggaactgagaagtaactctttattaaatatccagaatccataaactggatttaaagcaagtgttaaatattaaatggtgagttggtagaagctccagtccttcacgttggctgactcagcagggctaggaatacgcttcttttctgtggtagtttgtgctctctcttgcctaaactgggtggtaaagaggacacaattgcataatggtatgtacttaaaatcacttggagcatcctgtcccagagaggagggcatttgagttgaaggactttgggtgggggaagcatgggcccccagggacttcactctctttgcatccttcagctttgagcctggaaatccttcagactttgttttgctccaggctgttccagatgtggtttatttttctgttgatactatggtgaatctgtttactttaaaaactacattttaaggccaggcgcggtggctcacgcctgtaatcccagcactt

SEQ ID NO: 3702 - DNA, 22 bp, Homo sapiens
ggagacagaaaggcccagtaaa

SEQ ID NO: 3703 - DNA, 22 bp, Homo sapiens
tccattcaaggatggaatgtgt

SEQ ID NO: 3704 - DNA, 1687 bp, Homo sapiens
tgagtacacagtaaagctgagtaagtctcaaagaaaggatctcggccaggtgcagtggctcatgcctgtaatcccagcactttgggaggccgaggctggaggattgcttgagctcaggcattcaagaccagcctgggcaacatggcaaaaccccatctctatatttaaatgtattttaaaggaagaaagaaaagaaaaaaaaggacctctcccatattccctttagtgacaatagttggttttggtacaggattctgcatgattttccaggtgggattttttttcatgaatgtttatagaatgcctaccatgtggtgactgtcactaaggaaaatgcaaaggaaaataagttgattgcagttcctgcccttatggaatttgctttataatggggagacagaaaggcccagtaaacagacaacttgccgtgtttacccactcaggtaaatgaaaggttaaatacgatgttttcaagatgtttttgacttgcttctttttttcttccctttctcagtgttagaaattgattttgcggagctcaccttggaagagattattggcatcgggggctttgggaaggtctatcgtgctttctggataggggatgaggttgctgtgaaagcagctcgccacgaccctgatgaggacatcagccagaccatagagaatgttcgccaagaggccaagctcttcgccatgctgaagcaccccaacatcattgccctaagaggggtatgtctgaaggagcccaacctctgcttggtcatggagtttgctcgtggaggacctttgaatagagtgttatctgggaaaaggattcccccagacatcctggtgaattgggctgtgcagattgccagagggatgaactacttacatgatgaggcaattgttcccatcatccaccgcgaccttaagtccagcaacagtgagtatgaagagatggggctggaggggctcagagcarttgcagttgtatcccacgacgtcagtaggagtggacttctaatggaaccttagagggcagtgaaactccttgcttaaacacattccatccttgaatggagatgtaggaggtgagatgagtgccaagaaagattggtttaggaagagaggaaagaggcgcctgaggagtttgggataattttgagcttttttttttagcagtctagagtggccttccctactatttttccacatatcagaatgtgtaattctgatatgctgtgcacaaaacttgtgggaagtgtgaatattatcacaaaagggattttcctctttgtggaacaagaggtagagcaagcctttattatctgtttgaatgtttacctaaacacctcaacttgagatacccatcacagaagggactgtaagaagagaatgctattctttaaactgtgagctgattcaggtggtgatgtccatttggagagcatgacttcctggtaatatcaccaacctcctggtagcccaagggtggtattaattaaatgccataattacctagtgtttaatagcagggaactgagaagtaactctttattaaatatccagaatccataaactggatttaaagcaagtgttaaatattaaatggtgagttggtagaagctccagtccttcacgttggctgactcagcagggctaggaatacgcttcttttctgtggtagtttgtgctctctctt

SEQ ID NO: 3705 - DNA, 2001 bp, Homo sapiens
tttttttcttttctttcttcctttaaaatacatttaaatatagagatggggttttgccatgttgcccaggctggtcttgaatgcctgagctcaagcaatcctccagcctcggcctcccaaagtgctgggattacaggcatgagccactgcacctggccgagatcctttctttgagacttactcagctttactgtgtactcagtggtgagaagcacccaactcagtgccaaggcagacacccaacaaccaaaccataggatgagaagagcttctgcagaagtatgattagaggcttaggaaaatcactagctcccacagcagcacagagcactaagggggtgagtggggaaaggattctcagggaaggcaacatttgaaattggccctaaagagtgagtgggagagatctcaggcgatgaaggaaatcagggcagggaaggacaatcaggcagacggaaggacaggagccaagaacatggagtacgaagtatacggtatattaggacctccagggagtctgctgtggccaggtcatgtgcatcaggattggagacgaggctcaaagccttgttgagggtaaccaggccaggaaatgtctttaaagccattctgaggggcttgaacatcacattgtaaacaagaggagtcatgtatctttcagaaaaggaatgttgttagacctgtaatttagaaaggaaatcaactctggcagccactggaaactaacctggaggacacagacccaacagcaaaaggaccccctaaggaggccttgcagctcagaggtctgaacctcagcagcagtgaatatagggagtacgcagtcaatttgggagactttcagaacttggttctacctggacctggagactgaaacatgggaaaggagcctcataagagatatcttactccagcagtcatctgtgcctcagttcaagccctgatgatcccagtatcccacccagtatcccaaccaatcattctccttcccaaatccagaatttgaacctaaggtacttgattatatattttgttgtgtgtggaaaggctttcatgggtagataataatagctgccagtgattataaagcgagctacatgtggtgctaagtgctatatgagcaaagtgtgttttgtttcttgcatgaaaccctgttctctatcttcttttttcttttgtctttacctggctgattcatactcatacctcaggtcttaaatatcagtttcatagtggaacttctccatcaccaagaccaaatgaggtcaggcccctatcaaacacttccatggcagtttccattccacaagaggcatcaagattataattacttaattacttgttcaatgcctattgtccaggccagattatgagacccacaagggcagagattctgtctgccctattcaccactgcacttgccatgccaaacattttgtaggtaaccaagagatccttgaaataaaatggaaaaaaaatctacttgatatggtttggatatttgaaccctctgattttcatgttgaaatgtaagccccagtgctggcggtggggcctggtgggaggtgtttgggtcatgagggccgatcccccatgaatggcttggcaccctcctcacagtaatgagtgagttcttgctcgaattcacacaagatctggttgtttaaaagagtgtgacacctatctggtttttctctcttgctcctggctcccaccacgtgacatgcctgctcccacttcaccttccgccatgaataaaagctccctgaggcctcaccagagccaagcagatgctggtgccatgcttcccgtacaggctgcagaaccgtgagccagttaaactttttttctttataaattacccagcctcaggtattccttcatagcaatgcaggaatggactaacacactatctcaggaggaaataaaccaaattcagatcttaaaaaaaaaaaaaaaaaaaaaaaaactgaactggaactagaccttctgaaacaaata

SEQ ID NO: 3706 - DNA, 801 bp, Homo sapiens
acaatatttgaaaggcagaagtgagatgaagaccatgttcttgctgcagggattttttgcatcagcatgttggtgtccaatcactaagtctgtagatgtggagaggaatgtttcatagccaagtggttgcctaatctctgggctgcagacacaacagggtgtttttgaagccaacagcttcaatggcagctcctgattctgtatgttcccaattagagaagtagcagctgacctggtgggccagttctgctatgttctgggagttgttcacataggtccagctgagagcctcttctctcagcccttccaacaattctgcaagcacagaatttcctgtgctaaatctctttcttgctcaaaatagcttgagagtttctgagccccagaatgaatccagactgattactaacttgtgcctgatgtcatctatatgaatgagaaaaatatgcctatgttataaagaaagattagaaactctcttggagaaatacatgttaagagtcttcctggtcatggagggaggaacattcatgtttttctagcagcttttacacatatgaaaagatgtgtgattacttaacaaatttgtatctgttttcttatttcctcaactgagtatctgaattctccttaagggaattttaactattgtactttctcttgtaccctcccttctttcctccagtcttaagcatagttgtaaacacacagtaggtgttaaatattcatttaaatgcaggagggattgaaaaaataaatgcagggaggtttaaaagacatgattcagtactagggtgctga

SEQ ID NO: 3707 - DNA, 2001 bp, Homo sapiens
aactggcagtctgcacaaaggaaactcttaggtggatgttagtggatagtctttagatatacaaaaagtatagcccatcctgacctcaaaattccaactgtttaaagaggttatcaccttatccagcaatcttcctgaagaatgaatgtcatggcagaacattgtagactagcaatcggcatccattccataatccttctagcacaaatttcagtactacagaggctaggaagctaaaaactacatttcccagactcctttacagctaaagttctgaatgcagattaaattctgccaattagatgcacaatatttgaaaggcagaagtgagatgaagaccatgttcttgctgcagggattttttgcatcagcatgttggtgtccaatcactaagtctgtagatgtggagaggaatgtttcatagccaagtggttgcctaatctctgggctgcagacacaacagggtgtttttgaagccaacagcttcaatggcagctcctgattctgtatgttcccaattagagaagtagcagctgacctggtgggccagttctgctatgttctgggagttgttcacataggtccagctgagagcctcttctctcagcccttccaacaattctgcaagcacagaatttcctgtgctaaatctctttcttgctcaaaatagcttgagagtttctgagccccagaatgaatccagacttattactaacttgtgcctgatgtcatctatatgaatgagaaaaatatgcctatgttataaagaaagattagaaactctcttggagaaatacatgttaagagtcttcctggtcatggagggaggaacattcatgtttttctagcagcttttacacatatgaaaagatgtgtgattacttaacaaatttgtatctgttttcttatttcctcaactgagtatctgaattctccttaagggaattttaactattgtactttctcttgtaccctcccttctttcctccagtcttaagcacagttgtaaacacacagtaggtgttaaatattcatttaaatgcaggagggattgaaaaaataaatgcagggaggtttaaaagacatgattcagtactagggtgctgaaaggacagctcctctaaaaacctctgcagggaagggaaagcaataacctctctttgagtagaacataaaaatctcaggttcttgctatttagttaagcaaatattatgacctgactccaagaaaagtatagaacacaactttcaagcagataaaagacagaacccagaaagaagggagggaggaaggaccttctttttccttccctgctcagtccctgtggataggaacgaaggaactagaccttcagctgcagcagagtatgtggggctctccttcccttccctgctccagtcaagacctggttttaagtaagaatcaggtcaagctgcattcagcacatttttcagtttctgtggaaggatatttccaggaatatcaggaataaatccttagttcttccatttttaaagtcaagatgttattccctctcaatcgtatgcttggaaactgaatgtttaggcatattttggtgggttttgagtaagtgaatgttatatacttcactcaaaaatcttaggtacatctgaaaatatgtccttctatttctagtggatgtagataataaaaaacataaactaataaccttaatgtatgccctgtttgaaaactgaaacaactctcttgttagagaaactttcatataatacctaggattgcatctcccaagataatgagtttggaactgtacatttttcatctttcactaaaataaagacgatggatgagctcctgggttatttatacttgtcatccatagacagctaaactctaacaagtacctacaatggagaggattaaagcattatatgaatgtaaaatgatttataatatcatttttatatgttttctttgtcataatatttagtaatttccccttctgttttgaataaagt

SEQ ID NO: 3708 - DNA, 2001 bp, Homo sapiens
ttaggtggatgttagtggatagtctttagatatacaaaaagtatagcccatcctgacctcaaaattccaactgtttaaagaggttatcaccttatccagcaatcttcctgaagaatgaatgtcatggcagaacattgtagactagcaatcggcatccattccataatccttctagcacaaatttcagtactacagaggctaggaagctaaaaactacatttcccagactcctttacagctaaagttctgaatgcagattaaattctgccaattagatgcacaatatttgaaaggcagaagtgagatgaagaccatgttcttgctgcagggattttttgcatcagcatgttggtgtccaatcactaagtctgtagatgtggagaggaatgtttcatagccaagtggttgcctaatctctgggctgcagacacaacagggtgtttttgaagccaacagcttcaatggcagctcctgattctgtatgttcccaattagagaagtagcagctgacctggtgggccagttctgctatgttctgggagttgttcacataggtccagctgagagcctcttctctcagcccttccaacaattctgcaagcacagaatttcctgtgctaaatctctttcttgctcaaaatagcttgagagtttctgagccccagaatgaatccagacttattactaacttgtgcctgatgtcatctatatgaatgagaaaaatatgcctatgttataaagaaagattagaaactctcttggagaaatacatgttaagagtcttcctggtcatggagggaggaacattcatgtttttctagcagcttttacacatatgaaaagatgtgtgattacttaacaaatttgtatctgttttcttatttcctcaactgagtatctgaattctccttaagggaattttaactattgtactttctcttgtaccctcccttctttcctccagtcttaagcatagttgtaaacacacagtaggtgttaaatattcatttaaatgcaggagggattgaaaaaataaatgcagggaggtttaaaagacatgattcagtactagggtgctgaaaggacagctcctctaaaaacctctgcagggaagggaaagcaataacctctctttgagtagaacataaaaatctcaggttcttgctatttagttaagcaaatattatgacctgactccaagaaaagtatagaacacaactttcaagcagataaaagacagaacccagaaagaagggagggaggaaggaccttctttttccttccctgctcagtccctgtggataggaacgaaggaactagaccttcagctgcagcagagtatgtggggctctccttcccttccctgctccagtcaagacctggttttaagtaagaatcaggtcaagctgcattcagcacatttttcagtttctgtggaaggatatttccaggaatatcaggaataaatccttagttcttccatttttaaagtcaagatgttattccctctcaatcgtatgcttggaaactgaatgtttaggcatattttggtgggttttgagtaagtgaatgttatatacttcactcaaaaatcttaggtacatctgaaaatatgtccttctatttctagtggatgtagataataaaaaacataaactaataaccttaatgtatgccctgtttgaaaactgaaacaactctcttgttagagaaactttcatataatacctaggattgcatctcccaagataatgagtttggaactgtacatttttcatctttcactaaaataaagacgatggatgagctcctgggttatttatacttgtcatccatagacagctaaactctaacaagtacctacaatggagaggattaaagcattatatgaatgtaaaatgatttataatatcatttttatatgttttctttgtcataatatttagtaatttccccttctgttttgaataaagtttgaggccagatacagtggcttatgcc

SEQ ID NO: 3709 - DNA, 21 bp, Homo sapiens
tcccttctttcctccagtctt

SEQ ID NO: 3710 - DNA, 20 bp, Homo sapiens
cctatccacagggactgagc

SEQ ID NO: 3711 - DNA, 801 bp, Homo sapiens
  misc_feature 401: n = A,T,C or G
tcaaaatagcttgagagtttctgagccccagaatgaatccagacttattactaacttgtgcctgatgtcatctatatgaatgagaaaaatatgcctatgttataaagaaagattagaaactctcttggagaaatacatgttaagagtcttcctggtcatggagggaggaacattcatgtttttctagcagcttttacacatatgaaaagatgtgtgattacttaacaaatttgtatctgttttcttatttcctcaactgagtatctgaattctccttaagggaattttaactattgtactttctcttgtaccctcccttctttcctccagtcttaagcatagttgtaaacacacagtaggtgttaaatattcatttaaatgcaggagggattgaaaaaatnatgcagggaggtttaaaagacatgattcagtactagggtgctgaaaggacagctcctctaaaaacctctgcagggaagggaaagcaataacctctctttgagtagaacataaaaatctcaggttcttgctatttagttaagcaaatattatgacctgactccaagaaaagtatagaacacaactttcaagcagataaaagacagaacccagaaagaagggagggaggaaggaccttctttttccttccctgctcagtccctgtggataggaacgaaggaactagaccttcagctgcagcagagtatgtggggctctccttcccttccctgctccagtcaagacctggttttaagtaagaatcaggtcaagctgcattcagcacatttttcagtttctgtg

SEQ ID NO: 3712 - DNA, 20 bp, Homo sapiens
cctcccttctttcctccagt

SEQ ID NO: 3713 - DNA, 20 bp, Homo sapiens
gctgtcctttcagcacccta

SEQ ID NO: 3714 - DNA, 801 bp, Homo sapiens; identical to SEQ ID NO: 3711
  misc_feature 401: n = A,T,C or G

SEQ ID NO: 3715 - DNA, 2001 bp, Homo sapiens
cacatttttcagtttctgtggaaggatatttccaggaatatcaggaataaatccttagttcttccatttttaaagtcaagatgttattccctctcaatcgtatgcttggaaactgaatgtttaggcatattttggtgggttttgagtaagtgaatgttatatacttcactcaaaaatcttaggtacatctgaaaatatgtccttctatttctagtggatgtagataataaaaaacataaactaataaccttaatgtatgccctgtttgaaaactgaaacaactctcttgttagagaaactttcatataatacctaggattgcatctcccaagataatgagtttggaactgtacatttttcatctttcactaaaataaagacgatggatgagctcctgggttatttatacttgtcatccatagacagctaaactctaacaagtacctacaatggagaggattaaagcattatatgaatgtaaaatgatttataatatcatttttatatgttttctttgtcataatatttagtaatttccccttctgttttgaataaagtttgaggccagatacagtggcttatgcctataatcccaacactctggaaggctgaggtgggaggaatgattgaagccaagagtttgaaaccagcctgggcaacaaagcaagacctcacctctgttaaaaaagtaaataaaaataattggctgggcatggtggcatgcgcctctggtcccagcttctttgggaggctggggtgggaggatctcttgagcccaggagttcaaggttgcaatgagctatgattatgccactgcacttcagcctgggcgacagagtgaaaacctgtctctaaaaattaaaaaaacaaaaaaagcttttaaataaagtttgaagctaaattttcactttaagaagcaataatatgaaactaaagctgaacagtattgcttgacttaatgtcttctattcatggtccagaatgcaacgtcacaacacatactcagaggagaagttcaaaagggtaactctggcgatgaagtgtcagtggctcaatttcattccaagtcttcggagacaaggtttgtcaatcgtcttcactttccgagtgacacaaactgatctggtagagcacatagacttcaatgaccgcccatgttcaccctctgatgaaccaaggcactgcactgaagttttatatttacatacttaatctccctcatgtaacttataagcaacttctgatcttatcacttctttatgtcctggtacttaacacagtgtacagtatctatcactcactaggtactcaataattagtttttgactgaaactaaattttctgaattatcaaaaattaattctagtcaagatcagaactcctagtgaggccaaataaaagaacgtgtcaggtctttcaaatgccatattcttcaagttaattctttccattagaacaagttacttcctactttctcaacatctgggttccagatttaggaatccactctatccaagataacttgtatgacaatgaagataagtcctggccaccaaatgaaaaagtagcacgctgttgccatgcctagctctgtggacagtttttcagcctaagtcatactgactcttgactgctctagcagccagagcacaagatattgaagaaaccgagttcctgatcacgaacctcacctagctcttctgctttgacattagctgtccctgaaaacaaaatcacaaaacttcacccacagaatcaaaatctgacttatgtttaaaatgacactgttttctaacatgccaggctattcatatttcttccaatatatgaccaagttcattttcaacactttcaaaacactatgccaggatgcttagccttaaggctaccaaactagtcccaaaaagatgtagtatctggaaacaatttaaagtaatttgctacctccaggcattttaaagatcaaaatgaagaaaaatgaagttttaaactgaatgagag

SEQ ID NO: 3716 - DNA, 2001 bp, Homo sapiens
aggaatatcaggaataaatccttagttcttccatttttaaagtcaagatgttattccctctcaatcgtatgcttggaaactgaatgtttaggcatattttggtgggttttgagtaagtgaatgttatatacttcactcaaaaatcttaggtacatctgaaaatatgtccttctatttctagtggatgtagataataaaaaacataaactaataaccttaatgtatgccctgtttgaaaactgaaacaactctcttgttagagaaactttcatataatacctaggattgcatctcccaagataatgagtttggaactgtacatttttcatctttcactaaaataaagacgatggatgagctcctgggttatttatacttgtcatccatagacagctaaactctaacaagtacctacaatggagaggattaaagcattatatgaatgtaaaatgatttataatatcatttttatatgttttctttgtcataatatttagtaatttccccttctgttttgaataaagtttgaggccagatacagtggcttatgcctataatcccaacactctggaaggctgaggtgggaggaatgattgaagccaagagtttgaaaccagcctgggcaacaaagcaagacctcacctctgttaaaaaagtaaataaaaataattggctgggcatggtggcatgcgcctctggtcccagcttctttgggaggctggggtgggaggatctcttgagcccaggagttcaaggttgcaatgagctatgattatgccactgcacttcagcctgggcgacagagtgaaaacctgtctctaaaaattaaaaaaacaaaaaaagcttttaaataaagtttgaagctaaattttcactttaagaagcaataatatgaaactaaagctgaacagtattgcttgacttaatgtcttctattcatggtccagaatgcaacgtcacaacacatgctcagaggagaagttcaaaagggtaactctggcgatgaagtgtcagtggctcaatttcattccaagtcttcggagacaaggtttgtcaatcgtcttcactttccgagtgacacaaactgatctggtagagcacatagacttcaatgaccgcccatgttcaccctctgatgaaccaaggcactgcactgaagttttatatttacatacttaatctccctcatgtaacttataagcaacttctgatcttatcacttctttatgtcctggtacttaacacagtgtacagtatctatcactcactaggtactcaataattagtttttgactgaaactaaattttctgaattatcaaaaattaattctagtcaagatcagaactcctagtgaggccaaataaaagaacgtgtcaggtctttcaaatgccatattcttcaagttaattctttccattagaacaagttacttcctactttctcaacatctgggttccagatttaggaatccactctatccaagataacttgtatgacaatgaagataagtcctggccaccaaatgaaaaagtagcacgctgttgccatgcctagctctgtggacagtttttcagcctaagtcatactgactcttgactgctctagcagccagagcacaagatattgaagaaaccgagttcctgatcacgaacctcacctagctcttctgctttgacattagctgtccctgaaaacaaaatcacaaaacttcacccacagaatcaaaatctgacttatgtttaaaatgacactgttttctaacatgccaggctattcatatttcttccaatatatgaccaagttcattttcaacactttcaaaacactatgccaggatgcttagccttaaggctaccaaactagtcccaaaaagatgtagtatctggaaacaatttaaagtaatttgctacctccaggcattttaaagatcaaaatgaagaaaaatgaagttttaaactgaatgagagggagagggggaacctaaagatttgaacatcgat

SEQ ID NO: 3717 - DNA, 19 bp, Homo sapiens
gaggcgcatgaacaatagg

SEQ ID NO: 3718 - DNA, 18 bp, Homo sapiens
aaggtgaagaagcccaag

SEQ ID NO: 3719 - DNA, 708 bp, Homo sapiens
gaggcgcatgaacaataggcggcggcggctcctgcgggcggcggcggccccgcaccctatggatcggccgctccatggagccctccagagcgcttctcggctgcctagcgagcgccgccgctgccgccccgccgggggaggatggagcaggggccggggccgaggaggaggaggaggaggaggaggaggcggcggcggcggtgggccccggggagctgggctgcgacgcgccgctgccctactggacggccgtgttcgagtacgaggcggcgggcgaggacgagctgaccctgcggctgggcgacgtggtggaggtgctgtccaaggactcgcaggtgtccggcgacgagggctggtggaccgggcagctgaaccagcgggtgggcatcttccccagcaactacgtgaccccgcgcagcgccttctccagccgctgccagcccggcggcgaggaccccagttgctacccgcccattcagtgtaaggcgaaggcggggccgggcggggagggggaatgacggaggcctggggggcggtcggggaaggggggagcactgcgcgagggctgggatgagggcggggggtggggaggacgattgacctgggtgtgggtggcgcgcgcttaggctgcccgggctttgcttgctggataagctcgagacgcctcaggccctgcccgcacttcagacgcttgggcttcttcacctt

SEQ ID NO: 3720 - DNA, 19 bp, Homo sapiens
gaggcgcatgaacaatagg

SEQ ID NO: 3721 - DNA, 18 bp, Homo sapiens
aaggtgaagaagcccaag

SEQ ID NO: 3722 - DNA, 1155 bp, Homo sapiens
tcctgcgggcggcggcggccccgcaccctatggatcggccgctccatggagccctccagagcgcttctcggctgcctagcgagcgccgccgctgccgccccgccgggggaggatggagcaggggccggggccgaggaggaggaggaggaggaggaggaggcggcggcggcggtgggccccggggagctgggctgcgacgcgccgctgccctactggacggccgtgttcgagtacgaggcggcgggcgaggacgagctgaccctgcggctgggcgacgtggtggaggtgctgtccaaggactcgcaggtgtccggcgacgagggctggtggaccgggcagctgaaccagcgggtgggcatcttccccagcaactacgtgaccccgcgcagcgccttctccagccgctgccagcccggcggcgaggaccccagttgctacccgcccattcagtgtaaggcgaaggcggggccgggcggggagggggaatgacggaggcctggggggcggtcggggaaggggggagcactgcgcgagggctgggatgagggcggggggtggggaggacgattgacctgggtgtgggtggcgcgcgcttaggctgcccgggcttygcttgctggataagctcgagacgcctcaggccctgcccgcacttcagacgcttgggcttcttcaccttcagttggccacctcagcagtggctcccgatttccacatcctgaagtcccagtctgagaatttgccagtttcccagtcccttctcttacccacccccccgccgccccccattcccaatctggaagtgtttatggcaagatggtggttagtgtcctagccttagtccccaaatcagggaccttgccaccacctcttctaacgcctgtccccgcctcctaaaggcatttgctttcaaagagatgggggtgtctccgcagggctgagctggctcacaagtcccggaagcatgtgtgaactcaaggctcagttgcctgtaaaatgtcgggttgatttcttggatcctatttcttatatctcagaagttgtacctttaggagtctcactgattaatgtgctaagagggatgtgtgtgttgagagtgggggtgagacaagtgatgattagagaggaaaaagtatgtcgttcccccatgggaga

SEQ ID NO: 3723 - DNA, 18 bp, Homo sapiens
acacctgcgagtccttgg

SEQ ID NO: 3724 - DNA, 19 bp, Homo sapiens
aggaggaggaggaggagga

SEQ ID NO: 3725 - DNA, 171 bp, Homo sapiens
acacctgcgagtccttggacagcacctccaccacgtcgcccagccgcagggtcagctcgtcctcgcccgccgcctcgtactcgaacacggccgtccagtagggcagcggcgcgtcgcagcccagctccccggggcccaccgccgccgccgcctcctcctcctcctcctcct

SEQ ID NO: 3726 - DNA, 20 bp, Homo sapiens
gagtccttggacagcacctc

SEQ ID NO: 3727 - DNA, 18 bp, Homo sapiens
ggcgcatgaacaataggc

SEQ ID NO: 3728 - DNA, 329 bp, Homo sapiens
gagtccttggacagcacctccaccacgtcgcccagccgcagggtcagctcgtcctcgcccgccgcctcgtactcgaacacggccgtccagtagggcagcggcgcgtcgcagcccagctccccggggcccaccgccgccgccgcctcctcctcctcctcctcctcctcctcggccccggcccctgctccatcctcccccggcggggcggcagcggcggcgctcgctaggcagccgagaagcgctctggagggctccatggagcggccgatccatagggtgcggggccgccgccgcccgcaggagccgccgccgcctattgttcatgcgcc

SEQ ID NO: 3729 - DNA, 18 bp, Homo sapiens
cagggtcagctcgtcctc

SEQ ID NO: 3730 - DNA, 18 bp, Homo sapiens
ggaggcgcatgaacaata

SEQ ID NO: 3731 - DNA, 294 bp, Homo sapiens
cagggtcagctcgtcctcgcccgccgcctcgtactcgaacacggccgtccagtagggcagcggcgcgtcgcagcccagctccccggggcccaccgccgccgccgcctcctcctcctcctcctcctcctcctcggccccggcccctgctccatcctcccccggcggggcggcagcggcggcgctcgctaggcagccgagaagcgctctggagggctccatggagcggccgatccatagggtgcggggccgccgccgcccgcaggagccgccgccgcctattgttcatgcgcctcc

SEQ ID NO: 3732 - DNA, 18 bp, Homo sapiens
aacacggccgtccagtag

SEQ ID NO: 3733 - DNA, 18 bp, Homo sapiens
ctcggcgctcttctcgta

SEQ ID NO: 3734 - DNA, 372 bp, Homo sapiens
aacacggccgtccagtagggcagcggcgcgtcgcagcccagctccccggggcccaccgccgccgccgcctcctcctcctcctcctcctcctcctcggccccggcccctgctccatcctcccccggcggggcggcagcggcggcgctcgctaggcagccgagaagcgctctggagggctccatggagcggccgatccatagggtgcggggccgccgccgcccgcaggagccgccgccgcctattgttcatgcgcctccgcagagctgggaggacccccccccaacgacggcggccgcaggtagggcccgggctggcagggctgggagagccggctcgccggcgctgttaccgcggtacgagaagagcgccgag

SEQ ID NO: 3735 - DNA, 18 bp, Homo sapiens
gctaggcagccgagaagc

SEQ ID NO: 3736 - DNA, 18 bp, Homo sapiens
cctaggctgcgcgaagag

SEQ ID NO: 3737 - DNA, 249 bp, Homo sapiens
gctaggcagccgagaagcgctctggagggctccatggagcggccgatccatagggtgcggggccgccgccgcccgcaggagccgccgccgcctattgttcatgcgcctccgcagagctgggaggacccccccccaacgacggcggccgcaggtagggcccgggctggcagggctgggagagccggctcgccggcgctgttaccgcggtacgagaagagcgccgagcgcgagctcttcgcgcagcctagg

SEQ ID NO: 3738 - DNA, 18 bp, Homo sapiens
gctaggcagccgagaagc

SEQ ID NO: 3739 - DNA, 18 bp, Homo sapiens
ggaggcgcatgaacaata

SEQ ID NO: 3740 - DNA, 110 bp, Homo sapiens
gctaggcagccgagaagcgctctggagggctccatggagcggccgatccatagggtgcggggccgccgccgcccgcaggagccgccgccgcctattgttcatgcgcctcc

SEQ ID NO: 3741 - DNA, 20 bp, Homo sapiens
acgagataggaggcccataa

SEQ ID NO: 3742 - DNA, 20 bp, Homo sapiens
ggcttgagcctaggatgttg

SEQ ID NO: 3743 - DNA, 224 bp, Homo sapiens
acgagataggaggcccataatgtttcttcttgctttaatcctgtcgtggcaacgttgacttccagtaagaaaggttctctgatctttttttctcttttcttttcttttcttttcttttcctttcttttcttttcttttcttccagggtctcagtttgttgtccaggccagagtgcagtggcgcaatctcggctcactgcagcctcaacatcctaggctcaagcc

SEQ ID NO: 3744 - DNA, 20 bp, Homo sapiens
ggcaacgttgacttccagta

SEQ ID NO: 3745 - DNA, 19 bp, Homo sapiens
cagcccagagttcaagacg

SEQ ID NO: 3746 - DNA, 238 bp, Homo sapiens; identical to SEQ ID NO: 28

SEQ ID NO: 3747 - DNA, 2001 bp, Homo sapiens
ttgctccactgcactctagcctgggtaacaaaacgagaccctctctctcaaaaaaaaaaaaaggaacagaaaggagaggagaggaaggggtgaaggaaggagggagggcaggaggagagggaaagaaagaaaggacgaaaaagagaaaaacaggaaggaagcagggaggggagaaaaggaaggaaagaaaggagggaagggaagaaagagggcaggcatcatagactattgaagaatttggggtcttggcttctgactgagtttgaatctatgcttactgtgtgccattaggcaagttaaccctgctgtgccccagatccctcacctggaaattagggataattgtacctatcttatatatgttatgtgcttaacacataatctagcatgtagttactggtattatttgagcctaaaccgtgacttagttaatgaatgtcaccctttccttgattcttttgggaaatatttaaaattagtactttgatgtaaaaaaaaaaaatccctcaagcagacttttacctttttttttttttttttttaaagaaacaaggtctcactgtgtcacccaggctggagagcagtggcacgatcatagctcactgatcacatggcagcctcaaactcctggactcagtgggtcctcctgcctcagcatcctgagtagctgggactacaggtgcgtgccaccacacctggcaaattttgttaatttttggtagagataaggactcactgtgttgcccaggctggcttcaaactcttggcctcaagtgatcctcctgcctccatctcttcaaatgctgggattacaggtttgagccaccgtgcctggcccctttgaccttttctaaaagagccagcccaccactttcacctctcatgtgtaccatttcaggaaagaagccctagttcctgtttcataaactccatttgcattaaatatgattttaggcaaatggtttgggcagatatgtggcagggctgatggaacagacctgtggagtcagacccagacaagtcttgatcaacttgtcatgactgtgggaggcctttcacctctctgagcctctgtttcattgttggtaacatgagattgtataaaatggggttgctgtgaaggttagatgaagtaagaggtcctcctggcagtgcctaatacataataataagtgcttaataaattgtaaatgttattacagttgatagtatttaattcctctatgaggaattatgagttaatgtagcttgaaccaccaaaaaggtaagaaatctttcctcttttaggaaaacctcagttcagaaaagcaataaactatggggggggtggctgtttagaatgttgcatctctggagagcaagttgcattttaacaatgatcagagcctttaattaaggagtgaaggtcaaatcatttctgcttcatccagcctggttgcagagtgagcccatgggacagccctctgaaattatactgcttacaaccatgctgagtctgcaaggacttcgtccaagcctttccgtccaggacctcaaacagatccaatcacaagaagagagatttcaggaaagagaaaattattcctatcatcggggtttttgaagaacatgaaatgactgggaaaataatcatgttaagtggaaaaaaaaaagaaatctatctgttgtaattttcaaataatttttaaataaatttgaaaaattaagagaactatatatataatacattcctaatcttgtgaaaaatatatatgcattaatattattgaaagaaatatatcaaaaggtgaacagcaattatcaccaatctagattatgagattaggagtgattttttttctttgtcctatactatttaatattttctaccattaaaatattctgattttctaattagaatagtacgttagacaaagaaggacaaatatcacatgaactctcactctcttatggaacagatcttgtggaatctaaaaaagttgaactcatagaaaaagagga

SEQ ID NO: 3748 - DNA, 2001 bp, Homo sapiens
gagaaaaacaggaaggaagcagggaggggagaaaaggaaggaaagaaaggagggaagggaagaaagagggcaggcatcatagactattgaagaatttggggtcttggcttctgactgagtttgaatctatgcttactgtgtgccattaggcaagttaaccctgctgtgccccagatccctcacctggaaattagggataattgtacctatcttatatatgttatgtgcttaacacataatctagcatgtagttactggtattatttgagcctaaaccgtgacttagttaatgaatgtcaccctttccttgattcttttgggaaatatttaaaattagtactttgatgtaaaaaaaaaaaatccctcaagcagacttttacctttttttttttttttttttaaagaaacaaggtctcactgtgtcacccaggctggagagcagtggcacgatcatagctcactgatcacatggcagcctcaaactcctggactcagtgggtcctcctgcctcagcatcctgagtagctgggactacaggtgcgtgccaccacacctggcaaattttgttaatttttggtagagataaggactcactgtgttgcccaggctggcttcaaactcttggcctcaagtgatcctcctgcctccatctcttcaaatgctgggattacaggtttgagccaccgtgcctggcccctttgaccttttctaaaagagccagcccaccactttcacctctcatgtgtaccatttcaggaaagaagccctagttcctgtttcataaactccatttgcattaaatatgattttaggcaaatggtttgggcagatatgtggcagggctgatggaacagacctgtggagtcagacccagacaagtcttgatcaacttgtcatgactgtgggaggcctttcacctctctgagcctctgtttcattgttggtaacatgagattgtataaaatggggttgctgtgaaggttagatgaagtaagaggtcctcctggcagtgcctaatacataataataagtgcttaataaattgtaaatgttattacagttgatagtatttaattcctctatgaggaattatgagttaatgtagcttgaaccaccaaaaaggtaagaaatctttcctcttttaggaaaacctcagttcagaaaagcaataaactatggggggggtggctgtttagaatgttgcatctctggagagcaagttgcattttaacaatgatcagagcctttaattaaggagtgaaggtcaaatcatttctgcttcatccagcctggttgcagagtgagcccatgggacagccctctgaaattatactgcttacaaccatgctgagtctgcaaggacttcgtccaagcctttccgtccaggacctcaaacagatccaatcacaagaagagagatttcaggaaagagaaaattattcctatcatcggggtttttgaagaacatgaaatgactgggaaaataatcatgttaagtggaaaaaaaaaagaaatctatctgttgtaattttcaaataatttttaaataaatttgaaaaattaagagaactatatatataatacattcctaatcttgtgaaaaatatatatgcattaatattattgaaagaaatatatcaaaaggtgaacagcaattatcaccaatctagattatgagattaggagtgattttttttctttgtcctatactatttaatattttctaccattaaaatattctgattttctaattagaatagtacgttagacaaagaaggacaaatatcacatgaactctcactctcttatggaacagatcttgtggaatctaaaaaagttgaactcatagaaaaagaggaaaatgatggttaccagttagaaaaaaggaataagttcaagagatctattgtacaccatggtcaatatagttaacaatatattttatactttaaaattgctaaggtagtagattttaagtgttctcaccacacaaaaaaataa

SEQ ID NO: 3749 - DNA, 2001 bp, Homo sapiens
aagaaagagggcaggcatcatagactattgaagaatttggggtcttggcttctgactgagtttgaatctatgcttactgtgtgccattaggcaagttaaccctgctgtgccccagatccctcacctggaaattagggataattgtacctatcttatatatgttatgtgcttaacacataatctagcatgtagttactggtattatttgagcctaaaccgtgacttagttaatgaatgtcaccctttccttgattcttttgggaaatatttaaaattagtactttgatgtaaaaaaaaaaaatccctcaagcagacttttacctttttttttttttttttttaaagaaacaaggtctcactgtgtcacccaggctggagagcagtggcacgatcatagctcactgatcacatggcagcctcaaactcctggactcagtgggtcctcctgcctcagcatcctgagtagctgggactacaggtgcgtgccaccacacctggcaaattttgttaatttttggtagagataaggactcactgtgttgcccaggctggcttcaaactcttggcctcaagtgatcctcctgcctccatctcttcaaatgctgggattacaggtttgagccaccgtgcctggcccctttgaccttttctaaaagagccagcccaccactttcacctctcatgtgtaccatttcaggaaagaagccctagttcctgtttcataaactccatttgcattaaatatgattttaggcaaatggtttgggcagatatgtggcagggctgatggaacagacctgtggagtcagacccagacaagtcttgatcaacttgtcatgactgtgggaggcctttcacctctctgagcctctgtttcattgttggtaacatgagattgtataaaatggggttgctgtgaaggttagatgaagtaagaggtcctcctggcagtgcctaatacataataataagtgcttaataaattgtaaatgttattacaattgatagtatttaattcctctatgaggaattatgagttaatgtagcttgaaccaccaaaaaggtaagaaatctttcctcttttaggaaaacctcagttcagaaaagcaataaactatggggggggtggctgtttagaatgttgcatctctggagagcaagttgcattttaacaatgatcagagcctttaattaaggagtgaaggtcaaatcatttctgcttcatccagcctggttgcagagtgagcccatgggacagccctctgaaattatactgcttacaaccatgctgagtctgcaaggacttcgtccaagcctttccgtccaggacctcaaacagatccaatcacaagaagagagatttcaggaaagagaaaattattcctatcatcggggtttttgaagaacatgaaatgactgggaaaataatcatgttaagtggaaaaaaaaaagaaatctatctgttgtaattttcaaataatttttaaataaatttgaaaaattaagagaactatatatataatacattcctaatcttgtgaaaaatatatatgcattaatattattgaaagaaatatatcaaaaggtgaacagcaattatcaccaatctagattatgagattaggagtgattttttttctttgtcctatactatttaatattttctaccattaaaatattctgattttctaattagaatagtacgttagacaaagaaggacaaatatcacatgaactctcactctcttatggaacagatcttgtggaatctaaaaaagttgaactcatagaaaaagaggaaaatgatggttaccagttagaaaaaaggaataagttcaagagatctattgtacaccatggtcaatatagttaacaatatattttatactttaaaattgctaaggtagtagattttaagtgttctcaccacacaaaaaaataagtatgtgaaaagcatatggtaattagcttgatttaaccacgccacagtgcatacatatg

SEQ ID NO: 3750 - DNA, 2001 bp, Homo sapiens
aattgtacctatcttatatatgttatgtgcttaacacataatctagcatgtagttactggtattatttgagcctaaaccgtgacttagttaatgaatgtcaccctttccttgattcttttgggaaatatttaaaattagtactttgatgtaaaaaaaaaaaatccctcaagcagacttttacctttttttttttttttttttaaagaaacaaggtctcactgtgtcacccaggctggagagcagtggcacgatcatagctcactgatcacatggcagcctcaaactcctggactcagtgggtcctcctgcctcagcatcctgagtagctgggactacaggtgcgtgccaccacacctggcaaattttgttaatttttggtagagataaggactcactgtgttgcccaggctggcttcaaactcttggcctcaagtgatcctcctgcctccatctcttcaaatgctgggattacaggtttgagccaccgtgcctggcccctttgaccttttctaaaagagccagcccaccactttcacctctcatgtgtaccatttcaggaaagaagccctagttcctgtttcataaactccatttgcattaaatatgattttaggcaaatggtttgggcagatatgtggcagggctgatggaacagacctgtggagtcagacccagacaagtcttgatcaacttgtcatgactgtgggaggcctttcacctctctgagcctctgtttcattgttggtaacatgagattgtataaaatggggttgctgtgaaggttagatgaagtaagaggtcctcctggcagtgcctaatacataataataagtgcttaataaattgtaaatgttattacagttgatagtatttaattcctctatgaggaattatgagttaatgtagcttgaaccaccaaaaaggtaagaaatctttcctcttttaggaaaacctcagttcagaaaagcaataaactatggggggggtggctgtttagaacgttgcatctctggagagcaagttgcattttaacaatgatcagagcctttaattaaggagtgaaggtcaaatcatttctgcttcatccagcctggttgcagagtgagcccatgggacagccctctgaaattatactgcttacaaccatgctgagtctgcaaggacttcgtccaagcctttccgtccaggacctcaaacagatccaatcacaagaagagagatttcaggaaagagaaaattattcctatcatcggggtttttgaagaacatgaaatgactgggaaaataatcatgttaagtggaaaaaaaaaagaaatctatctgttgtaattttcaaataatttttaaataaatttgaaaaattaagagaactatatatataatacattcctaatcttgtgaaaaatatatatgcattaatattattgaaagaaatatatcaaaaggtgaacagcaattatcaccaatctagattatgagattaggagtgattttttttctttgtcctatactatttaatattttctaccattaaaatattctgattttctaattagaatagtacgttagacaaagaaggacaaatatcacatgaactctcactctcttatggaacagatcttgtggaatctaaaaaagttgaactcatagaaaaagaggaaaatgatggttaccagttagaaaaaaggaataagttcaagagatctattgtacaccatggtcaatatagttaacaatatattttatactttaaaattgctaaggtagtagattttaagtgttctcaccacacaaaaaaataagtatgtgaaaagcatatggtaattagcttgatttaaccacgccacagtgcatacatatgtcaaaacatcatgttgtatactataaatatatacactttttgtcaattttaaacaggttataaaaaaacatgttattgttgataattatgaaaaattttaatgatgtggaaatgtgtacagtataatgataaatgaaag

SEQ ID NO: 3751 - DNA, 1002 bp, Homo sapiens
ttaccttttctcaggtatttcttttttatttttatttttattttttttgagacagagtcttggtctgttacccaggctatctcagctcactgcaacctccgcctcctgggttcaaacgattctcctgcctcagcctccccagcagctggaactacaggcacgcaccaccttacctggctaatttttgtatttttagtagagacggggtttcaccatgttggccaggctggtctcgaactcctgacctcaggtgatccacccgccttggcctcccaaagtgccgggattataggcgtgagccaccgcgcctggccaggtatttcttcatagcaatgcaagaacagcctgacacagaaggcactaaaaattacccatgctccaccacttagctcagaaatagctgttaagatttttatattatccacccaacacatttgtaattatattttataaggatttttactactctttcatttatcattatactgtacacatttccactatcattaaaatttttcataattatcaacaataacatgtttttttataacctgtttaaaattgacaaaaagtgtatatatttatagtatacaacatgatgttttgacatatgtatgcactgtggcgtggttaaatcaagctaattaccatatgcttttcacatacttatttttttgtgtggtgagaacacttaaaatctactaccttagcaattttaaagtataaaatatattgttaactatattgaccatggtgtacaatagatctcttgaacttattccttttttctaactggtaaccatcattttcctctttttctatgagttcaacttttttagattccacaagatctgttccataagagagtgagagttcatgtgatatttgtccttctttgtctaacgtactattctaattagaaaatcagaatattttaatggtagaaaatattaaatagtataggacaaagaaaaaaaatcactcctaatctcataatctaga

SEQ ID NO: 3752 - DNA, 2001 bp, Homo sapiens
tactttaaatgagacaggctattgaagaggtttgtttttgtttttgtttttgtttttttctgagacaaggtctcactctgttgcccaggctggagtgcaatggcgtgatctcagcccattacagcctcaacctgccgggctcaagcggttctcccaccttagcctcctgagtagctgggactacaggcatgcgccatcacacccagctaatttttgttgttgtcgttgttttgctttgttttgttttttgtagagacaaggtcccactatgttgcccagactgtctcgaacccctgggctcaagcaattctcctgctgtggcctcccaaagtactgggattacagacgtgagctaccatgccctgccacaccgatgatttcaatgagcagaggagtggtgtggtctgccttttcaacaagatcactctggctactgggtttgcaacaggcttcagaaagcaagtgcggggactgtgagaggaagggactattcagtaagcctgtcaagggataacagcaaattagaaaagggaggtgacaatgggtatggtcaaaagtggccagaatttagaaatacattttgagggtagaccaaccaggtttgctgatgaatcagaaagggaataaaagaaagagaggagtcaaggatgacatcaaggtttttggtttgagcaactggaaggctggcgttgccattaacggagaatgtgggaaaagctggtttgggggcaaatctcaccagtttaatgttagacatgataagtttgagatcactgttctatacccaagtggagatgtcaagtgggcagttgattacatcatctggagttcattcaagaactgttaaatgacaacagtctagtccctgagaaccttaactctataaaatgactaagggcgcaataatgattagaaaacattcagactcaaataataaaatactttctcctttaacgtggttttccagatttctactcaaggagaccttttaagtggctatgcctttcctagttgaaggctgtgaatcttttgctcacagacatgagacatgagtctcctgacactgatgagacctttaagacagttgcctgttctctgggttactggatggagccctttgtgaagtcagtgggagccccagagagaagcctgcttggccggtggaacatcagggaaactctcttgtgctttgtgttttatgaaaagtaggggagattccaacctgaagccttcccatctttgcttcctggggttttgttgatacccaggtcaggtgcaattgcttgcagcttcatgatgtctcttcgttatcttatagtctgccctcttccccagctctgtacatgatggaattgccattcttttgcatgggtacactccttcctgggatgtgggcaagggatggcagagtgactgacagcttattgagtactaggcagtaggttgggcactgatagacataccctccattagtatacgaagacgaagccaccgacctaccaactgtaccactcactgtaatcacagccaacatttatatactattttagagttcagaaaacacttttacagacaggtgccagtatactgactaagagtacatacagactctgaggccaggcacagtgacccatgcctataatcccaatgctttgggaggcaaaaccggaggatcacttgaggacagaagttcaagaccaacctgggccacaaagtgagtccctccctgtctctacaaaaaattaaaaactttgccagatatagtggtgcacacctgtggtcccagctaccaggaattcaaggttacagtgagctatggcaccactgcgccactgcacttcagcctgggagagggagtaagaccttgtctattaaaaaaaaaatacagactctggaaccaggttgcctgagttgaatctcagttctgtccagttctgccatgactcactgtgtggtctaggacaatttacttagcctctctgttaagtcttggtttcttca

SEQ ID NO: 3753 - DNA, 2001 bp, Homo sapiens
gctattgaagaggtttgtttttgtttttgtttttgtttttttctgagacaaggtctcactctgttgcccaggctggagtgcaatggcgtgatctcagcccattacagcctcaacctgccgggctcaagcggttctcccaccttagcctcctgagtagctgggactacaggcatgcgccatcacacccagctaatttttgttgttgtcgttgttttgctttgttttgttttttgtagagacaaggtcccactatgttgcccagactgtctcgaacccctgggctcaagcaattctcctgctgtggcctcccaaagtactgggattacagacgtgagctaccatgccctgccacaccgatgatttcaatgagcagaggagtggtgtggtctgccttttcaacaagatcactctggctactgggtttgcaacaggcttcagaaagcaagtgcggggactgtgagaggaagggactattcagtaagcctgtcaagggataacagcaaattagaaaagggaggtgacaatgggtatggtcaaaagtggccagaatttagaaatacattttgagggtagaccaaccaggtttgctgatgaatcagaaagggaataaaagaaagagaggagtcaaggatgacatcaaggtttttggtttgagcaactggaaggctggcgttgccattaacggagaatgtgggaaaagctggtttgggggcaaatctcaccagtttaatgttagacatgataagtttgagatcactgttctatacccaagtggagatgtcaagtgggcagttgattacatcatctggagttcattcaagaactgttaaatgacaacagtctagtccctgagaaccttaactctataaaatgactaagggcgcaataatgattagaaaacattcagactcaaataataaaatactttctcctttaacgtggttttccagatttctactcaaggagaccttttaagtggctattcctttcctagttgaagactgtgaatcttttgctcacagacatgagacatgagtctcctgacactgatgagacctttaagacagttgcctgttctctgggttactggatggagccctttgtgaagtcagtgggagccccagagagaagcctgcttggccggtggaacatcagggaaactctcttgtgctttgtgttttatgaaaagtaggggagattccaacctgaagccttcccatctttgcttcctggggttttgttgatacccaggtcaggtgcaattgcttgcagcttcatgatgtctcttcgttatcttatagtctgccctcttccccagctctgtacatgatggaattgccattcttttgcatgggtacactccttcctgggatgtgggcaagggatggcagagtgactgacagcttattgagtactaggcagtaggttgggcactgatagacataccctccattagtatacgaagacgaagccaccgacctaccaactgtaccactcactgtaatcacagccaacatttatatactattttagagttcagaaaacacttttacagacaggtgccagtatactgactaagagtacatacagactctgaggccaggcacagtgacccatgcctataatcccaatgctttgggaggcaaaaccggaggatcacttgaggacagaagttcaagaccaacctgggccacaaagtgagtccctccctgtctctacaaaaaattaaaaactttgccagatatagtggtgcacacctgtggtcccagctaccaggaattcaaggttacagtgagctatggcaccactgcgccactgcacttcagcctgggagagggagtaagaccttgtctattaaaaaaaaaatacagactctggaaccaggttgcctgagttgaatctcagttctgtccagttctgccatgactcactgtgtggtctaggacaatttacttagcctctctgttaagtcttggtttcttcaagtgcaaaatggagatt

SEQ ID NO: 3754 - DNA, 2001 bp, Homo sapiens
cactgatgagacctttaagacagttgcctgttctctgggttactggatggagccctttgtgaagtcagtgggagccccagagagaagcctgcttggccggtggaacatcagggaaactctcttgtgctttgtgttttatgaaaagtaggggagattccaacctgaagccttcccatctttgcttcctggggttttgttgatacccaggtcaggtgcaattgcttgcagcttcatgatgtctcttcgttatcttatagtctgccctcttccccagctctgtacatgatggaattgccattcttttgcatgggtacactccttcctgggatgtgggcaagggatggcagagtgactgacagcttattgagtactaggcagtaggttgggcactgatagacataccctccattagtatacgaagacgaagccaccgacctaccaactgtaccactcactgtaatcacagccaacatttatatactattttagagttcagaaaacacttttacagacaggtgccagtatactgactaagagtacatacagactctgaggccaggcacagtgacccatgcctataatcccaatgctttgggaggcaaaaccggaggatcacttgaggacagaagttcaagaccaacctgggccacaaagtgagtccctccctgtctctacaaaaaattaaaaactttgccagatatagtggtgcacacctgtggtcccagctaccaggaattcaaggttacagtgagctatggcaccactgcgccactgcacttcagcctgggagagggagtaagaccttgtctattaaaaaaaaaatacagactctggaaccaggttgcctgagttgaatctcagttctgtccagttctgccatgactcactgtgtggtctaggacaatttacttagcctctctgttaagtcttggtttcttcaagtgcaaaatggagattttaaataatcctaactacctcctaaactagcttagagattaaccgagataatacggaggcagccctaagagcagtgcctagaacatagtgagccctcaataaaggcagaagggatcgtactacctggttgggactttttagccaattttactaataaggaaacggaagcccagggagtttattcagtgtggctaagtactaaggaacagtactaaggaacagaagcccaagacccaatcaggggttcctgcttctgactccaaagcttttcccactcagaatccacttccttagggagtgtgggttttatgttaaaacaagccaaactttcgcaccggctcttctggtgtctcctagctttgcttctgagaaaggacagctgaggttggagggaataacagcaaaaataattgacattcttgggtccatcggtcggtgtgccgggcctgtgccaaggacttcacctgcccttcccattcaatattcaccaaaaaacctatgtgctaggtactttgaataaccactttatataaaaagtggggtgcagagccactaagcaagcaggggtggcgtgtgtcggagccagaatccattatcggctctctgatcagtttacccccaggaggacctttccccgaccccctaccccgccgggagcagcctatcttcgtgcaaaatgcaccgagctacatacagaggctgccttccaggactcagcgcggagggttaggctgcctcgaaccccattctggtaactccatcccagctgggacgccgggccctctccgccccttgcggcccacccctccccttctgccccccaacacggggaccgggcgggctctcggtcggcgccaccgcgcccccgcatcaggatcctcggcgctgacgttctctccccagggggaggaggggcccaggaagggttaggtccgcagccagtgcggagaaagggccctgggctcggctcccacgctcgggcaggcctcccgccgggggatcggagctgcggtcactcgcggcttcggggccgtggcgtcccgc

SEQ ID NO: 3755 - DNA, 2001 bp, Homo sapiens
gccccagagagaagcctgcttggccggtggaacatcagggaaactctcttgtgctttgtgttttatgaaaagtaggggagattccaacctgaagccttcccatctttgcttcctggggttttgttgatacccaggtcaggtgcaattgcttgcagcttcatgatgtctcttcgttatcttatagtctgccctcttccccagctctgtacatgatggaattgccattcttttgcatgggtacactccttcctgggatgtgggcaagggatggcagagtgactgacagcttattgagtactaggcagtaggttgggcactgatagacataccctccattagtatacgaagacgaagccaccgacctaccaactgtaccactcactgtaatcacagccaacatttatatactattttagagttcagaaaacacttttacagacaggtgccagtatactgactaagagtacatacagactctgaggccaggcacagtgacccatgcctataatcccaatgctttgggaggcaaaaccggaggatcacttgaggacagaagttcaagaccaacctgggccacaaagtgagtccctccctgtctctacaaaaaattaaaaactttgccagatatagtggtgcacacctgtggtcccagctaccaggaattcaaggttacagtgagctatggcaccactgcgccactgcacttcagcctgggagagggagtaagaccttgtctattaaaaaaaaaatacagactctggaaccaggttgcctgagttgaatctcagttctgtccagttctgccatgactcactgtgtggtctaggacaatttacttagcctctctgttaagtcttggtttcttcaagtgcaaaatggagattttaaataatcctaactacctcctaaactagcttagagattaactgagataatacggaggcagccctaagagcagtgcctagaacatagtgagccctcaataaaggcagaagggatcatactacctggttgggactttttagccaattttactaataaggaaacggaagcccagggagtttattcagtgtggctaagtactaaggaacagtactaaggaacagaagcccaagacccaatcaggggttcctgcttctgactccaaagcttttcccactcagaatccacttccttagggagtgtgggttttatgttaaaacaagccaaactttcgcaccggctcttctggtgtctcctagctttgcttctgagaaaggacagctgaggttggagggaataacagcaaaaataattgacattcttgggtccatcggtcggtgtgccgggcctgtgccaaggacttcacctgcccttcccattcaatattcaccaaaaaacctatgtgctaggtactttgaataaccactttatataaaaagtggggtgcagagccactaagcaagcaggggtggcgtgtgtcggagccagaatccattatcggctctctgatcagtttacccccaggaggacctttccccgaccccctaccccgccgggagcagcctatcttcgtgcaaaatgcaccgagctacatacagaggctgccttccaggactcagcgcggagggttaggctgcctcgaaccccattctggtaactccatcccagctgggacgccgggccctctccgccccttgcggcccacccctccccttctgccccccaacacggggaccgggcgggctctcggtcggcgccaccgcgcccccgcatcaggatcctcggcgctgacgttctctccccagggggaggaggggcccaggaagggttaggtccgcagccagtgcggagaaagggccctgggctcggctcccacgctcgggcaggcctcccgccgggggatcggagctgcggtcactcgcggcttcggggccgtggcgtcccgcgcacagcttccgcgcctctgcaaggcggtgagtcgtttcttcccggcacaggagggacagtttccccacgtgg

SEQ ID NO: 3756 - DNA, 20 bp, Homo sapiens
cctttcctccttcccttcac

SEQ ID NO: 3757 - DNA, 20 bp, Homo sapiens
agtgggtcgagggagagtta

SEQ ID NO: 3758 - DNA, 371 bp, Homo sapiens
cctttcctccttcccttcacccccactttccttcttccctcctcctctcctcctcccctcctcccctccttccttcctcccctcctcccttcctccgccccctcctcttacagggaaggatgccctcggtttcgctgcgctctcccaggagcgaactcccgcagccgctcaggccagcgccagagaccttgtccctaccaaggcgggccgcgccccttggtgggctgggctcagggagcgcgctttgcacgcttcagatgtctttgtgggaagcctgggagtagctaggtgtgaatgtgctgcccttaatttaagccaccagttgtaaatatgtgttctagtgcatattaataactctccctcgacccact

SEQ ID NO: 3759 - DNA, 21 bp, Homo sapiens
atgataactggttgcggatca

SEQ ID NO: 3760 - DNA, 27 bp, Homo sapiens
aaagagagaaagaaagagagagagaaa

SEQ ID NO: 3761 - DNA, 210 bp, Homo sapiens
atgataactggttgcggatcattaggttcctgtccctagagttgtgtgtcccaaagcaagccactcagcattctggacctcaggtttttttctgtcttcctctttctttctttctttctttctctttctttctttctttctttctttctttctttctttctttctttcttttttctttctctctttctctctctctttctttctctcttt

SEQ ID NO: 3762 - DNA, 2001 bp, Homo sapiens
ttggccaggacggtctcgatctcttgacctcgtgatctgcccgcctcagcctcccaaagtgctgggattacaggcatgagccaccgtgcccagccgagataggaatttttaaaaacagacccacagcaaggtgaaataaagtagatgtgaagtaagaatattaatacctgttttgcctacctcataaggttgtgccaagaatcaaatgagatcatggataacaagtatccttaaagcactatgcaaatgtaagcaagtagtaattattatttggctttgcgggagataccaattgggttgtttgcctgaatctcccctttttcccaagaactgctcctatagccaaatccacatgataacagtggattgccaaatccacatgataacacctcctcaggtgccattttggttgattgagccaggtgcagaccccaggaatgggaatgaaggtggctcagtctcagtcactctgggctcttgagcagaggaaatacaaacactggaggcttagaaagctattttctgactaggtggactgaaaatttaaaaataccaaattgggccaggcacggtggcccacgcctgtaatcccagcactttgggaggctgaggcgggtggatctcctgaggtcaggagttcaagaccagcctggacaacatggtgaaaccccatctgtactaaaaacacaaaaaattagccaggcatggtagcgggcacctgtgattccagctactcgggaggctgaggcaggagaatctcttgaaccctggaaggtggaggtttcagtgagctgagatcatgccactacactccagcctgggcaacaagagtaaaactccgtctcaaaaaaaaaaaagaaaagaaaaaaaaaacccaaactgcatccagagaaagcatgtagacgttcagagaggaatgaaaacaagaggctccctgtcattcaggccttggttcccatctgtccctgcctgctgtaaacaatatcccaccaagggccagcttttgctaaagatagctctggtgggcttcaatcaccattaaacagttcctaaactaattctgctaaggctaatgtagagcagaagactcccttggcccatgtaacagctgtgtcatcattcatttactcatcccatcagtcaatgaatatcattgaatgccagctgtttacaagcttgtaagaagaggaagaaaaaacattggctgcagtctttaaaatataaaccagccactggatgtcagccttctggccaactggctctcaatgctcctgaaatttcccagttgtgccctgggagcattttggaggtatctgacatagctgccactcacagctctttctgagaagttctagagccttggacaccatggtgttttcccatcagccttcctcctctggtaacagccgctaaaccccactcacacacacactttcggggagctgcctcacctgcttccatgttcttctggtgagactttaatcacatgacccctcccctgagcatagacagggtggacttagggcctaaactgagcaacagaatcactttctggggactttgaactttgagctgagacacaaatgcagagggcagttggagccgggccatgccaccgcagcaccacatagaaaagcttcagccctgctgagatcacggtgcctggtccctgggttcagttattcctttaaatctgtagccaccccggattttcatctcttacaaaataaatatcttttgaaccaaattagccaatcaagtatttgtaaccaaagagttcgggcacatctgctctctgctttttcagataaaagctcatggatgagtgaagaaaaagaagaaaaggataaaatagagaagttgtgttgtgtcccctgctcaagcctgcagcacagcctagctcctagtttaagaccctttaatgaatctatatttaccatcaggtttttatttatggaaatctacacaaggcatttggatgaaggctgatgcttatttcag

SEQ ID NO: 3763 - DNA, 2001 bp, Homo sapiens
gacggtctcgatctcttgacctcgtgatctgcccgcctcagcctcccaaagtgctgggattacaggcatgagccaccgtgcccagccgagataggaatttttaaaaacagacccacagcaaggtgaaataaagtagatgtgaagtaagaatattaatacctgttttgcctacctcataaggttgtgccaagaatcaaatgagatcatggataacaagtatccttaaagcactatgcaaatgtaagcaagtagtaattattatttggctttgcgggagataccaattgggttgtttgcctgaatctcccctttttcccaagaactgctcctatagccaaatccacatgataacagtggattgccaaatccacatgataacacctcctcaggtgccattttggttgattgagccaggtgcagaccccaggaatgggaatgaaggtggctcagtctcagtcactctgggctcttgagcagaggaaatacaaacactggaggcttagaaagctattttctgactaggtggactgaaaatttaaaaataccaaattgggccaggcacggtggcccacgcctgtaatcccagcactttgggaggctgaggcgggtggatctcctgaggtcaggagttcaagaccagcctggacaacatggtgaaaccccatctgtactaaaaacacaaaaaattagccaggcatggtagcgggcacctgtgattccagctactcgggaggctgaggcaggagaatctcttgaaccctggaaggtggaggtttcagtgagctgagatcatgccactacactccagcctgggcaacaagagtaaaactccgtctcaaaaaaaaaaaagaaaagaaaaaaaaaacccaaactgcatccagagaaagcatgtagacgttcagagaggaatgaaaacaagaggctccctgtcattcaggccttggttcccatctgtccctgcctgctgtaaacaatatcccaccaagggccagcttttgctaaagatagctctggtgggcttcaatcaccattaaacagttcctaaactaattctgctaaggctaatgtagagcagaagactcccttggcccatgtaacagctgtgtcatcattcatttactcatcccatcagtcaatgaatatcattgaatgccagctgtttacaagcttgtaagaagaggaagaaaaaacattggctgcagtctttaaaatataaaccagccactggatgtcagccttctggccaactggctctcaatgctcctgaaatttcccagttgtgccctgggagcattttggaggtatctgacatagctgccactcacagctctttctgagaagttctagagccttggacaccatggtgttttcccatcagccttcctcctctggtaacagccgctaaaccccactcacacacacactttcggggagctgcctcacctgcttccatgttcttctggtgagactttaatcacatgacccctcccctgagcatagacagggtggacttagggcctaaactgagcaacagaatcactttctggggactttgaactttgagctgagacacaaatgcagagggcagttggagccgggccatgccaccgcagcaccacatagaaaagcttcagccctgctgagatcacggtgcctggtccctgggttcagttattcctttaaatctgtagccaccccggattttcatctcttacaaaataaatatcttttgaaccaaattagccaatcaagtatttgtaaccaaagagttcgggcacatctgctctctgctttttcagataaaagctcatggatgagtgaagaaaaagaagaaaaggataaaatagagaagttgtgttgtgtcccctgctcaagcctgcagcacagcctagctcctagtttaagaccctttaatgaatctatatttaccatcaggtttttatttatggaaatctacacaaggcatttggatgaaggctgatgcttatttcaggaaagcaa

SEQ ID NO: 3764 - DNA, 2001 bp, Homo sapiens
aagaatattaatacctgttttgcctacctcataaggttgtgccaagaatcaaatgagatcatggataacaagtatccttaaagcactatgcaaatgtaagcaagtagtaattattatttggctttgcgggagataccaattgggttgtttgcctgaatctcccctttttcccaagaactgctcctatagccaaatccacatgataacagtggattgccaaatccacatgataacacctcctcaggtgccattttggttgattgagccaggtgcagaccccaggaatgggaatgaaggtggctcagtctcagtcactctgggctcttgagcagaggaaatacaaacactggaggcttagaaagctattttctgactaggtggactgaaaatttaaaaataccaaattgggccaggcacggtggcccacgcctgtaatcccagcactttgggaggctgaggcgggtggatctcctgaggtcaggagttcaagaccagcctggacaacatggtgaaaccccatctgtactaaaaacacaaaaaattagccaggcatggtagcgggcacctgtgattccagctactcgggaggctgaggcaggagaatctcttgaaccctggaaggtggaggtttcagtgagctgagatcatgccactacactccagcctgggcaacaagagtaaaactccgtctcaaaaaaaaaaaagaaaagaaaaaaaaaacccaaactgcatccagagaaagcatgtagacgttcagagaggaatgaaaacaagaggctccctgtcattcaggccttggttcccatctgtccctgcctgctgtaaacaatatcccaccaagggccagcttttgctaaagatagctctggtgggcttcaatcaccattaaacagttcctaaactaattctgctaaggctaatgtagagcagaagactcccttggcccatgtaacagctgtgtcatcattcatttactcatcccatcagtcaatgaatatcactgaatgccagctgtttacaagcttgtaagaagaggaagaaaaaacattggctgcagtctttaaaatataaaccagccactggatgtcagccttctggccaactggctctcaatgctcctgaaatttcccagttgtgccctgggagcattttggaggtatctgacatagctgccactcacagctctttctgagaagttctagagccttggacaccatggtgttttcccatcagccttcctcctctggtaacagccgctaaaccccactcacacacacactttcggggagctgcctcacctgcttccatgttcttctggtgagactttaatcacatgacccctcccctgagcatagacagggtggacttagggcctaaactgagcaacagaatcactttctggggactttgaactttgagctgagacacaaatgcagagggcagttggagccgggccatgccaccgcagcaccacatagaaaagcttcagccctgctgagatcacggtgcctggtccctgggttcagttattcctttaaatctgtagccaccccggattttcatctcttacaaaataaatatcttttgaaccaaattagccaatcaagtatttgtaaccaaagagttcgggcacatctgctctctgctttttcagataaaagctcatggatgagtgaagaaaaagaagaaaaggataaaatagagaagttgtgttgtgtcccctgctcaagcctgcagcacagcctagctcctagtttaagaccctttaatgaatctatatttaccatcaggtttttatttatggaaatctacacaaggcatttggatgaaggctgatgcttatttcaggaaagcaagtctgtggtttcaacaaaacctctgttagctccctccacacctgttcgctcttctgccaaactacctattgctcatttctaaagcaaaaaataaaatcaggaatcggattccaaagcaggacaaaagtggtgattaaagagacag

SEQ ID NO: 3765 - DNA, 2001 bp, Homo sapiens
cattatgtatttctagtcaacacaggtccctcttgaaaatatcttcctaatatcatagaagttgccccccaaagtaatactgatagaatcataaataataggccagtaatacagctaactaatagcagatctaggaccagaactcaggtcttagtatcactaaatcagagttctttccaccattccatgcctcctttcacaatagaatttgcctaaatattatttcaaaatgtcttcattataagaattttatttatctacatatatcagtgtttctttgaacaataaatatttgacaaagaatctagatacagaaactttaagtatttatttccactactagtcaagatctataaagtatgcagattatatatcactagggatggagaatccaaataacacaattaaatgcacatccaaatattaactaaatattattcatcagagagaaaagagtcagggagtgagagacagagaaagaggttgtctctcccccactgttcattacgccagagttttagcccctgggcgttataatggtcttaccacacctgtacgggcctcagcttctaaagtttcatcaggccgaatgtcgtggctcacgcttgtaatcccagcatttttgggaggccgaggtgggtggatcacctgaggccaggagttcaagaccagtctggccaacatggcaaaaccccgtctctatgaaaaatacaaaaattagccaggcatggtggtgcacacctatcccagctactcgggaggctgaggcatgagaattgcttgaacctggaaggcagaggctgcagtgagcttagatctcaccactgcactccagcctgggtggcagagcgagaccctgtctcaaaaaatttttaaaaaagtttcatcagtgtgtcacactcatatacacaggtattgtttccaaagctcattcaaaaagtgctaggtaactaggccaggaaaggtttccagcctaacatactctgcccattccagccttgccaatatgataacctaagtgctggtgttcagacaaattgccatttcggtcaactcttgtcatcaacttaagttgccccttggggaggcttaatgtccctttctgccttctggacttggttgggatcatcttaggcattggaagtatcaaataatgttaaacctcgagagatgtagcttgggtattaggtccctttcatttaagtagggtccttggcccccaaaacacgtttctccaacctctttggaagtcagctacataccagggattagaccaaaccttagccataaaactggccctgtttgcttcattcctctgggaagatggaccaccacttgctttaacttcgcatagttaaagagccaactcagacaattcttgccaaacaagatctgcccccacggtcttttgccatacacatcctagacactgccttcagcagtgtcagaactttgaacctcttttaaagggcagcttctctctctaatgaaatagtcaattttttttaccttgttttaccttgtttgggcctttctacccaagaatcagcagtttaatagtttcctcattcatcatacctgtagagcactgcactaggagaaaaagaaataagatacaggatttcccaaatgaagaggataaaggccaaggcaaggctgcagcagcaatctcagctgtcctgtgccaaagatgacaggaccactgggagagaaaaaggcgaacagggacggacaagagagaagaggcagtaatcagtagtctgaagactgctggagaacaacttgacattgtgtatttaaggacagcctcaacaaagaaaccttattagccagagctatcaaaatagacccacttactaaatatgtttccaaactcttcactcccactcaactgcatatagaaacatcctacaaaaataattttttcaacacacccctttgaaatacatggtaacgttcccgtttgaagagcaaaatgattgtggtgcagatggtaagtgc

SEQ ID NO: 3766 - DNA, 2001 bp, Homo sapiens
ttctagtcaacacaggtccctcttgaaaatatcttcctaatatcatagaagttgccccccaaagtaatactgatagaatcataaataataggccagtaatacagctaactaatagcagatctaggaccagaactcaggtcttagtatcactaaatcagagttctttccaccattccatgcctcctttcacaatagaatttgcctaaatattatttcaaaatgtcttcattataagaattttatttatctacatatatcagtgtttctttgaacaataaatatttgacaaagaatctagatacagaaactttaagtatttatttccactactagtcaagatctataaagtatgcagattatatatcactagggatggagaatccaaataacacaattaaatgcacatccaaatattaactaaatattattcatcagagagaaaagagtcagggagtgagagacagagaaagaggttgtctctcccccactgttcattacgccagagttttagcccctgggcgttataatggtcttaccacacctgtacgggcctcagcttctaaagtttcatcaggccgaatgtcgtggctcacgcttgtaatcccagcatttttgggaggccgaggtgggtggatcacctgaggccaggagttcaagaccagtctggccaacatggcaaaaccccgtctctatgaaaaatacaaaaattagccaggcatggtggtgcacacctatcccagctactcgggaggctgaggcatgagaattgcttgaacctggaaggcagaggctgcagtgagcttagatctcaccactgcactccagcctgggtggcagagcgagaccctgtctcaaaaaatttttaaaaaagtttcatcagtgtgtcacactcatatacacaggtattgtttccaaagctcattcaaaaagtgctaggtaactaggccaggaaaggtttccagcctaacatactctgcccattccagcctttccaatatgacaacctaagtgctggtgttcagacaaattgccatttcggtcaactcttgtcatcaacttaagttgccccttggggaggcttaatgtccctttctgccttctggacttggttgggatcatcttaggcattggaagtatcaaataatgttaaacctcgagagatgtagcttgggtattaggtccctttcatttaagtagggtccttggcccccaaaacacgtttctccaacctctttggaagtcagctacataccagggattagaccaaaccttagccataaaactggccctgtttgcttcattcctctgggaagatggaccaccacttgctttaacttcgcatagttaaagagccaactcagacaattcttgccaaacaagatctgcccccacggtcttttgccatacacatcctagacactgccttcagcagtgtcagaactttgaacctcttttaaagggcagcttctctctctaatgaaatagtcaattttttttaccttgttttaccttgtttgggcctttctacccaagaatcagcagtttaatagtttcctcattcatcatacctgtagagcactgcactaggagaaaaagaaataagatacaggatttcccaaatgaagaggataaaggccaaggcaaggctgcagcagcaatctcagctgtcctgtgccaaagatgacaggaccactgggagagaaaaaggcgaacagggacggacaagagagaagaggcagtaatcagtagtctgaagactgctggagaacaacttgacattgtgtatttaaggacagcctcaacaaagaaaccttattagccagagctatcaaaatagacccacttactaaatatgtttccaaactcttcactcccactcaactgcatatagaaacatcctacaaaaataattttttcaacacacccctttgaaatacatggtaacgttcccgtttgaagagcaaaatgattgtggtgcagatggtaagtgcccattattac

SEQ ID NO: 3767 - DNA, 2001 bp, Homo sapiens
taatatcatagaagttgccccccaaagtaatactgatagaatcataaataataggccagtaatacagctaactaatagcagatctaggaccagaactcaggtcttagtatcactaaatcagagttctttccaccattccatgcctcctttcacaatagaatttgcctaaatattatttcaaaatgtcttcattataagaattttatttatctacatatatcagtgtttctttgaacaataaatatttgacaaagaatctagatacagaaactttaagtatttatttccactactagtcaagatctataaagtatgcagattatatatcactagggatggagaatccaaataacacaattaaatgcacatccaaatattaactaaatattattcatcagagagaaaagagtcagggagtgagagacagagaaagaggttgtctctcccccactgttcattacgccagagttttagcccctgggcgttataatggtcttaccacacctgtacgggcctcagcttctaaagtttcatcaggccgaatgtcgtggctcacgcttgtaatcccagcatttttgggaggccgaggtgggtggatcacctgaggccaggagttcaagaccagtctggccaacatggcaaaaccccgtctctatgaaaaatacaaaaattagccaggcatggtggtgcacacctatcccagctactcgggaggctgaggcatgagaattgcttgaacctggaaggcagaggctgcagtgagcttagatctcaccactgcactccagcctgggtggcagagcgagaccctgtctcaaaaaatttttaaaaaagtttcatcagtgtgtcacactcatatacacaggtattgtttccaaagctcattcaaaaagtgctaggtaactaggccaggaaaggtttccagcctaacatactctgcccattccagcctttccaatatgataacctaagtgctggtgttcagacaaattgccatttcggtcaactcttgtcatcaacttaagttgccccttggggaggcttaatgtccctttctgccttctggacttggttgggatcatcttaggcattggaagtatcaaataatgttaaacctcgagagatgtagcttgggtattaggtccctttcatttaagtagggtccttggcccccaaaacacgtttctccaacctctttggaagtcagctacataccagggattagaccaaaccttagccataaaactggccctgtttgcttcattcctctgggaagatggaccaccacttgctttaacttcgcatagttaaagagccaactcagacaattcttgccaaacaagatctgcccccacggtcttttgccatacacatcctagacactgccttcagcagtgtcagaactttgaacctcttttaaagggcagcttctctctctaatgaaatagtcaattttttttaccttgttttaccttgtttgggcctttctacccaagaatcagcagtttaatagtttcctcattcatcatacctgtagagcactgcactaggagaaaaagaaataagatacaggatttcccaaatgaagaggataaaggccaaggcaaggctgcagcagcaatctcagctgtcctgtgccaaagatgacaggaccactgggagagaaaaaggcgaacagggacggacaagagagaagaggcagtaatcagtagtctgaagactgctggagaacaacttgacattgtgtatttaaggacagcctcaacaaagaaaccttattagccagagctatcaaaatagacccacttactaaatatgtttccaaactcttcactcccactcaactgcatatagaaacatcctacaaaaataattttttcaacacacccctttgaaatacatggtaacgttcccgtttgaagagcaaaatgattgtggtgcagatggtaagtgcccattattacagggcaaggtggtgaaaacatcagaaatgggttctta

SEQ ID NO: 3768 - DNA, 2001 bp, Homo sapiens
agaatcataaataataggccagtaatacagctaactaatagcagatctaggaccagaactcaggtcttagtatcactaaatcagagttctttccaccattccatgcctcctttcacaatagaatttgcctaaatattatttcaaaatgtcttcattataagaattttatttatctacatatatcagtgtttctttgaacaataaatatttgacaaagaatctagatacagaaactttaagtatttatttccactactagtcaagatctataaagtatgcagattatatatcactagggatggagaatccaaataacacaattaaatgcacatccaaatattaactaaatattattcatcagagagaaaagagtcagggagtgagagacagagaaagaggttgtctctcccccactgttcattacgccagagttttagcccctgggcgttataatggtcttaccacacctgtacgggcctcagcttctaaagtttcatcaggccgaatgtcgtggctcacgcttgtaatcccagcatttttgggaggccgaggtgggtggatcacctgaggccaggagttcaagaccagtctggccaacatggcaaaaccccgtctctatgaaaaatacaaaaattagccaggcatggtggtgcacacctatcccagctactcgggaggctgaggcatgagaattgcttgaacctggaaggcagaggctgcagtgagcttagatctcaccactgcactccagcctgggtggcagagcgagaccctgtctcaaaaaatttttaaaaaagtttcatcagtgtgtcacactcatatacacaggtattgtttccaaagctcattcaaaaagtgctaggtaactaggccaggaaaggtttccagcctaacatactctgcccattccagcctttccaatatgataacctaagtgctggtgttcagacaaattgccatttcggtcaactcttgtcatcaacttaagttgccccttggggaggcttaatgtccctttctgccttctggacttggttgggatcatcttaggcattggaagtatcaaataatgttaaacctcgagagatgtagcttgggtattaggtccctttcatttaagtagggtccttggcccccaaaacacgtttctccaacctctttggaagtcagctacataccagggattagaccaaaccttagccataaaactggccctgtttgcttcattcctctgggaagatggaccaccacttgctttaacttcgcatagttaaagagccaactcagacaattcttgccaaacaagatctgcccccacggtcttttgccatacacatcctagacactgccttcagcagtgtcagaactttgaacctcttttaaagggcagcttctctctctaatgaaatagtcaattttttttaccttgttttaccttgtttgggcctttctacccaagaatcagcagtttaatagtttcctcattcatcatacctgtagagcactgcactaggagaaaaagaaataagatacaggatttcccaaatgaagaggataaaggccaaggcaaggctgcagcagcaatctcagctgtcctgtgccaaagatgacaggaccactgggagagaaaaaggcgaacagggacggacaagagagaagaggcagtaatcagtagtctgaagactgctggagaacaacttgacattgtgtatttaaggacagcctcaacaaagaaaccttattagccagagctatcaaaatagacccacttactaaatatgtttccaaactcttcactcccactcaactgcatatagaaacatcctacaaaaataattttttcaacacacccctttgaaatacatggtaacgttcccgtttgaagagcaaaatgattgtggtgcagatggtaagtgcccattattacagggcaaggtggtgaaaacatcagaaatgggttcttaggtgcttgctgggaactgccttagatttcacacactt

SEQ ID NO: 3769 - DNA, 2001 bp, Homo sapiens
ggtgggtggatcacctgaggccaggagttcaagaccagtctggccaacatggcaaaaccccgtctctatgaaaaatacaaaaattagccaggcatggtggtgcacacctatcccagctactcgggaggctgaggcatgagaattgcttgaacctggaaggcagaggctgcagtgagcttagatctcaccactgcactccagcctgggtggcagagcgagaccctgtctcaaaaaatttttaaaaaagtttcatcagtgtgtcacactcatatacacaggtattgtttccaaagctcattcaaaaagtgctaggtaactaggccaggaaaggtttccagcctaacatactctgcccattccagcctttccaatatgataacctaagtgctggtgttcagacaaattgccatttcggtcaactcttgtcatcaacttaagttgccccttggggaggcttaatgtccctttctgccttctggacttggttgggatcatcttaggcattggaagtatcaaataatgttaaacctcgagagatgtagcttgggtattaggtccctttcatttaagtagggtccttggcccccaaaacacgtttctccaacctctttggaagtcagctacataccagggattagaccaaaccttagccataaaactggccctgtttgcttcattcctctgggaagatggaccaccacttgctttaacttcgcatagttaaagagccaactcagacaattcttgccaaacaagatctgcccccacggtcttttgccatacacatcctagacactgccttcagcagtgtcagaactttgaacctcttttaaagggcagcttctctctctaatgaaatagtcaattttttttaccttgttttaccttgtttgggcctttctacccaagaatcagcagtttaatagtttcctcattcatcatacctgtagagcactgcactaggagaaaaagaaataagatacaggatttcccaaatgaaaaggataaaggccaaggcaaggctgcagcagcaatctcagctgtcctgtgccaaagatgacaggaccactgggagagaaaaaggcgaacagggacggacaagagagaagaggcagtaatcagtagtctgaagactgctggagaacaacttgacattgtgtatttaaggacagcctcaacaaagaaaccttattagccagagctatcaaaatagacccacttactaaatatgtttccaaactcttcactcccactcaactgcatatagaaacatcctacaaaaataattttttcaacacacccctttgaaatacatggtaacgttcccgtttgaagagcaaaatgattgtggtgcagatggtaagtgcccattattacagggcaaggtggtgaaaacatcagaaatgggttcttaggtgcttgctgggaactgccttagatttcacacacttaggtgagtgttgcagtgatctatgactacctaacaagctcctccagaactcagccacttaaaacaacaaccatttatttgttaaggattctgcagttggggctgtgcttacctgggcagttcttctgctggtctcacctggagttactcgtgagtttgaagtcatctggcgaattgactggagcagaatgatctaagatgacctcactaacaggactggggcctgagtgctagctgtcagctcttcctctcagctgatgtcattcagtagcctcgtgctgcaggagcatgctatgagggttctggtggaagctgcaaggtttctcaggcctagtttccctttctccttccactcctcctctccttcttcctcctgctctccttttatccctggagcacactcagaggaaaggccacatgaagacaaagtggccatctgcaagccaggaagagggccctcaccggagccagaacctgatcagaaccttggtgtgggactttctgacctccagaactgtgaaaaaatacattcctgttgtttaagccagaga

SEQ ID NO: 3770 - DNA, 2001 bp, Homo sapiens
aaattagccaggcatggtggtgcacacctatcccagctactcgggaggctgaggcatgagaattgcttgaacctggaaggcagaggctgcagtgagcttagatctcaccactgcactccagcctgggtggcagagcgagaccctgtctcaaaaaatttttaaaaaagtttcatcagtgtgtcacactcatatacacaggtattgtttccaaagctcattcaaaaagtgctaggtaactaggccaggaaaggtttccagcctaacatactctgcccattccagcctttccaatatgataacctaagtgctggtgttcagacaaattgccatttcggtcaactcttgtcatcaacttaagttgccccttggggaggcttaatgtccctttctgccttctggacttggttgggatcatcttaggcattggaagtatcaaataatgttaaacctcgagagatgtagcttgggtattaggtccctttcatttaagtagggtccttggcccccaaaacacgtttctccaacctctttggaagtcagctacataccagggattagaccaaaccttagccataaaactggccctgtttgcttcattcctctgggaagatggaccaccacttgctttaacttcgcatagttaaagagccaactcagacaattcttgccaaacaagatctgcccccacggtcttttgccatacacatcctagacactgccttcagcagtgtcagaactttgaacctcttttaaagggcagcttctctctctaatgaaatagtcaattttttttaccttgttttaccttgtttgggcctttctacccaagaatcagcagtttaatagtttcctcattcatcatacctgtagagcactgcactaggagaaaaagaaataagatacaggatttcccaaatgaagaggataaaggccaaggcaaggctgcagcagcaatctcagctgtcctgtgccaaagatgacaggaccactgggagagaaaaaggcgaacagggacggacaagagagaagaggcagtaatcagtagtctgaagactgctggagaacaacttgacattgtgtatttaaggacagcctcaacaaagaaaccttattagccagagctatcaaaatagacccacttactaaatatgtttccaaactcttcactcccactcaactgcatatagaaacatcctacaaaaataattttttcaacacacccctttgaaatacatggtaacgttcccgtttgaagagcaaaatgattgtggtgcagatggtaagtgcccattattacagggcaaggtggtgaaaacatcagaaatgggttcttaggtgcttgctgggaactgccttagatttcacacacttaggtgagtgttgcagtgatctatgactacctaacaagctcctccagaactcagccacttaaaacaacaaccatttatttgttaaggattctgcagttggggctgtgcttacctgggcagttcttctgctggtctcacctggagttactcgtgagtttgaagtcatctggcgaattgactggagcagaatgatctaagatgacctcactaacaggactggggcctgagtgctagctgtcagctcttcctctcagctgatgtcattcagtagcctcgtgctgcaggagcatgctatgagggttctggtggaagctgcaaggtttctcaggcctagtttccctttctccttccactcctcctctccttcttcctcctgctctccttttatccctggagcacactcagaggaaaggccacatgaagacaaagtggccatctgcaagccaggaagagggccctcaccggagccagaacctgatcagaaccttggtgtgggactttctgacctccagaactgtgaaaaaatacattcctgttgtttaagccagagactctgtggcattttgttgtggcacctgagcaaactaatagaggttgtttacagttctggggctattgcaaatgaaactgc

SEQ ID NO: 3771 - DNA, 2001 bp, Homo sapiens
acaaccatttatttgttaaggattctgcagttggggctgtgcttacctgggcagttcttctgctggtctcacctggagttactcgtgagtttgaagtcatctggcgaattgactggagcagaatgatctaagatgacctcactaacaggactggggcctgagtgctagctgtcagctcttcctctcagctgatgtcattcagtagcctcgtgctgcaggagcatgctatgagggttctggtggaagctgcaaggtttctcaggcctagtttccctttctccttccactcctcctctccttcttcctcctgctctccttttatccctggagcacactcagaggaaaggccacatgaagacaaagtggccatctgcaagccaggaagagggccctcaccggagccagaacctgatcagaaccttggtgtgggactttctgacctccagaactgtgaaaaaatacattcctgttgtttaagccagagactctgtggcattttgttgtggcacctgagcaaactaatagaggttgtttacagttctggggctattgcaaatgaaactgcaatgaacatttgtatacaagtctcttgtgtggagatatgctttcatttctcttgagtaaatacctagaaatggaatggctgggttacatagtacatgtatgtttcccttttaaagaaactgtcaaaactattttccaaagcagctgtaccattttggattcccatcagcgtcatatgtgacttccagttgctttacatcacagggtctggtaaatgtttttaattttaaccactctggtgaatgcataagggtatctcattgtggttttaatttgcatttccctaatgactaattttttgttgttattgagacagggtctctctctgttgcccaggcttgagtgaaatggtgccatcacagctcactgcagactcagcctcctgggctcaggtgatcctcccacctcagcctcctgagtagctggtactgcaggtacacgccaccacacccagctaattttttgtatcttttgtagagacagggtttcaacatgttgcccaggctgctttgaaactcctaggctcaagcgatccgctcacctcagcctcccaaaatattggggttgctgatgtgaaccactgcacctattggctaatgttgttggtcatcgtttcatgtacttatttgccatctctatatcttctttggtgaaggattgtttccaatcattttgcccttttattattggctgagagctaattaaatgtacattcgaataagtgtaagcatagagagctagacacagaatcttactggctgtccagtttgggcaggtctgggaaaggagaccagaacatccaggaggcatctgtggacattgaaaacttggaggagggctcataagggcggaaggaaaagtggtcagcctaaaaataaattctgccagcttcacagtttgtctaagtttagcctgaggcccccctaacagttttctcaccattagcactgaattccagcccctagatgctctgagagccccaatttcaccacgctttctgtgggagtttcctggttcaggagtgcaccaccatatgtcactctggcctgaagaagtttgccaagtttgtagacaaatacggagacacccacgagaagtgcttagataagatttggcccagagtcttgtctgggggcagagctgagaagaaagcgatgtctaaaacgcgcttcactaacaggaggactttggaaaggagggatggagagaaaggactgaggagagttaggagagaggacgtgagggaacagtcatgctctgatcaaggacactgtgttcagccatggataactccatgccgcaaagagataagtgggagagagtccaggaaagagcaggataaatgattaaggaacagagaagctgatgtatgaagctgatttaatagaactcaccgaagctttttcatttaacaaaatgtaacaggagcaaaatttc

SEQ ID NO: 3772 - DNA, 2001 bp, Homo sapiens
gtgctagctgtcagctcttcctctcagctgatgtcattcagtagcctcgtgctgcaggagcatgctatgagggttctggtggaagctgcaaggtttctcaggcctagtttccctttctccttccactcctcctctccttcttcctcctgctctccttttatccctggagcacactcagaggaaaggccacatgaagacaaagtggccatctgcaagccaggaagagggccctcaccggagccagaacctgatcagaaccttggtgtgggactttctgacctccagaactgtgaaaaaatacattcctgttgtttaagccagagactctgtggcattttgttgtggcacctgagcaaactaatagaggttgtttacagttctggggctattgcaaatgaaactgcaatgaacatttgtatacaagtctcttgtgtggagatatgctttcatttctcttgagtaaatacctagaaatggaatggctgggttacatagtacatgtatgtttcccttttaaagaaactgtcaaaactattttccaaagcagctgtaccattttggattcccatcagcgtcatatgtgacttccagttgctttacatcacagggtctggtaaatgtttttaattttaaccactctggtgaatgcataagggtatctcattgtggttttaatttgcatttccctaatgactaattttttgttgttattgagacagggtctctctctgttgcccaggcttgagtgaaatggtgccatcacagctcactgcagactcagcctcctgggctcaggtgatcctcccacctcagcctcctgagtagctggtactgcaggtacacgccaccacacccagctaattttttgtatcttttgtagagacagggtttcaacatgttgcccaggctgctttgaaactcctaggctcaagcgatccgctcacctcagcctcccaaaatattggggttgctgatgtgaaccactgcacctattggctaacgttgttggtcatcgtttcatgtacttatttgccatctctatatcttctttggtgaaggattgtttccaatcattttgcccttttattattggctgagagctaattaaatgtacattcgaataagtgtaagcatagagagctagacacagaatcttactggctgtccagtttgggcaggtctgggaaaggagaccagaacatccaggaggcatctgtggacattgaaaacttggaggagggctcataagggcggaaggaaaagtggtcagcctaaaaataaattctgccagcttcacagtttgtctaagtttagcctgaggcccccctaacagttttctcaccattagcactgaattccagcccctagatgctctgagagccccaatttcaccacgctttctgtgggagtttcctggttcaggagtgcaccaccatatgtcactctggcctgaagaagtttgccaagtttgtagacaaatacggagacacccacgagaagtgcttagataagatttggcccagagtcttgtctgggggcagagctgagaagaaagcgatgtctaaaacgcgcttcactaacaggaggactttggaaaggagggatggagagaaaggactgaggagagttaggagagaggacgtgagggaacagtcatgctctgatcaaggacactgtgttcagccatggataactccatgccgcaaagagataagtgggagagagtccaggaaagagcaggataaatgattaaggaacagagaagctgatgtatgaagctgatttaatagaactcaccgaagctttttcatttaacaaaatgtaacaggagcaaaatttccatccgggcctgaaaggcaagggaagtgcacgtataaaagatgaggaaaatagcaaatgtacgagtcagcttgtctagcaaacccattaagtaaaatgagcataatttctgcgtgaagcaggccagttcttgatctaaacttgtttctctgtgtcgtgacg

SEQ ID NO: 3773 - DNA, 2001 bp, Homo sapiens
tccttccactcctcctctccttcttcctcctgctctccttttatccctggagcacactcagaggaaaggccacatgaagacaaagtggccatctgcaagccaggaagagggccctcaccggagccagaacctgatcagaaccttggtgtgggactttctgacctccagaactgtgaaaaaatacattcctgttgtttaagccagagactctgtggcattttgttgtggcacctgagcaaactaatagaggttgtttacagttctggggctattgcaaatgaaactgcaatgaacatttgtatacaagtctcttgtgtggagatatgctttcatttctcttgagtaaatacctagaaatggaatggctgggttacatagtacatgtatgtttcccttttaaagaaactgtcaaaactattttccaaagcagctgtaccattttggattcccatcagcgtcatatgtgacttccagttgctttacatcacagggtctggtaaatgtttttaattttaaccactctggtgaatgcataagggtatctcattgtggttttaatttgcatttccctaatgactaattttttgttgttattgagacagggtctctctctgttgcccaggcttgagtgaaatggtgccatcacagctcactgcagactcagcctcctgggctcaggtgatcctcccacctcagcctcctgagtagctggtactgcaggtacacgccaccacacccagctaattttttgtatcttttgtagagacagggtttcaacatgttgcccaggctgctttgaaactcctaggctcaagcgatccgctcacctcagcctcccaaaatattggggttgctgatgtgaaccactgcacctattggctaatgttgttggtcatcgtttcatgtacttatttgccatctctatatcttctttggtgaaggattgtttccaatcattttgcccttttattattggctgagagctaattaaatgtacattcgaataagtgtaagcatagagagctagacacagaatcttactggctgtccagtttgggcaggtctgggaaaggagaccagaacatccaggaggcatctgtggacattgaaaacttggaggagggctcataagggcggaaggaaaagtggtcagcctaaaaataaattctgccagcttcacagtttgtctaagtttagcctgaggcccccctaacagttttctcaccattagcactgaattccagcccctagatgctctgagagccccaatttcaccacgctttctgtgggagtttcctggttcaggagtgcaccaccatatgtcactctggcctgaagaagtttgccaagtttgtagacaaatacggagacacccacgagaagtgcttagataagatttggcccagagtcttgtctgggggcagagctgagaagaaagcgatgtctaaaacgcgcttcactaacaggaggactttggaaaggagggatggagagaaaggactgaggagagttaggagagaggacgtgagggaacagtcatgctctgatcaaggacactgtgttcagccatggataactccatgccgcaaagagataagtgggagagagtccaggaaagagcaggataaatgattaaggaacagagaagctgatgtatgaagctgatttaatagaactcaccgaagctttttcatttaacaaaatgtaacaggagcaaaatttccatccgggcctgaaaggcaagggaagtgcacgtataaaagatgaggaaaatagcaaatgtacgagtcagcttgtctagcaaacccattaagtaaaatgagcataatttctgcgtgaagcaggccagttcttgatctaaacttgtttctctgtgtcgtgacgagcctgttgttgacattttctcattctcttccatatttctcctcattccctccctcttcctcttttgcttagtgaatgttaaaatcataggtgaaactccaagccaggtgcggtggc

SEQ ID NO: 3774 - DNA, 20 bp, Homo sapiens
cattccctccctcttcctct

SEQ ID NO: 3775 - DNA, 22 bp, Homo sapiens
actctcagagctggagtttcat

SEQ ID NO: 3776 - DNA, 397 bp, Homo sapiens
cattccctccctcttcctcttttgcttagtgaatgttaaaatcataggtgaaactccaagccaggtgcggtggctcacacctgtaatcccagcactttgggaggctgaggcaggaggatcacttatcaggagtttgagaccagcctggccgatatggtaaaaccctgtctctaccaaaaatataaatatttgccaggtgtggtggcgcatgcctgtagtcccagctactcgggaggctgaggcacaagaatcgcttgaaccagggaggtggaggttgcagtgagccgagatcatgcactgcactccagcctgggcaccagagcaagactctgtcctaaataaataaatgaatgaataaataaataaataaataaaatgaaactccagctctgagagt

SEQ ID NO: 3777 - DNA, 20 bp, Homo sapiens
agattttggatgtatcaggc

SEQ ID NO: 3778 - DNA, 20 bp, Homo sapiens
cagaagcaataggatggatg

SEQ ID NO: 3779 - DNA, 296 bp, Homo sapiens; identical to SEQ ID NO: 29
  misc_feature 7, 72, 78, 213, 242, 249, 254, 264: n = A,T,C or G

SEQ ID NO: 3780 - DNA, 20 bp, Homo sapiens
gggtgaggcgattcctttag

SEQ ID NO: 3781 - DNA, 20 bp, Homo sapiens
gaagcccatgaccacattct

SEQ ID NO: 3782 - DNA, 235 bp, Homo sapiens
gggtgaggcgattcctttagaataaatctctttacacacacacacacacacacacacacacacacacacacacacgtgtacccacacacacgtgcatatgcacacacacacacgcacacatccatcctattgcttctgtttctctggagaaccctaatacaaatttgcatgtcattaaatatcactagtgatgtagctaagcattcaaaatactaagaatgtggtcatgggcttc

SEQ ID NO: 3783 - DNA, 2001 bp, Homo sapiens
ggtggaggttgcagtgagccgagatcatgcactgcactccagcctgggcaccagagcaagactctgtcctaaataaataaatgaatgaataaataaataaataaataaaatgaaactccagctctgagagttctttcttcacctttttagaggaatctttctggttgggtcctgtccatgggttcccccatccatggttatatctatattcctcgggctacacccagttgccctaggctgaggtttatcctaatatgcctaattcctctttgaactaggcctttcctcaagccaggagctcaggaaaaaataacaaatgattctactttgactatcttaacacaattgcacaaactattttggagtacttcgtctgatcatttttttgtatatgttggaagcgctcgtgtcacatcataacacctcagtgcatatattagagataatcattctgtgatgattcattttctgtgtcaacttgaccgcgccacagtgcccagatatttggccaaaagttattctggatgtttttgtgggagtgtttttggatgagatttgctttttaaatcaatggactctgagtaaagcagactgccccccatggtgtggtgggccacgccaaatcagttgaaggcctgaatagcacaaaaggctcacctcccctgagcaagagggaattctgccagccaactgccttcaaatttcttctgaaacatcagctcttcctggttcactagcagactgtctttggacttgaactgaaaccctttcctacatctctggccagttagcctcccgtgtcagattttggatgtatcaggcttccacaattgggtgaggcgattcctttagaataaatctctttacacacacacacacacacacacacacacacacacacacacacgtgtacccacacacacgtgcatatgcacacacacacacgcacacatccatcctattgcttctgtttctctggagaaccctaatacaaatttgcatgtcattaaatatcactagtgatgtagctaagcattcaaaatactaagaatgtggtcatgggcttcctcaattaagaattcagaactgggagctcgtaagttcactgaaattactgtatgttaaagtaggagcttacgcctatcatagggcaaatagcgcaaacatttttggagttatctccaatggcacaaaaggccatttgtatgaacatatatatttcaaccccctttgaactctgtgagttaaaaataaaaaattaaaatgtatcagtatcaacataatcattaataatgttggcctctttccatttaatcccttctgtctcacaactaaaagatctgctaatgagtttttattttgaaaagagcacctggtactaatttcacatagaaataacatccttagtaaaaagagattttataatacaacagagtaattccttcatcatcaaaatgccttattaagtgtccttttacatgcaatactctacaggtgttataaaaagaaaaacctttccttaatagtttataatatgagctatcacatgttaataactaataattatcatttattgagtacctgctatgtatcatactgttttaaatgcattatgggtataaatttttattattgtgacaaatctgctagatagtgttatgtaataaagaatttggtctttttcctggttcctgggaaagagactaaattcttggaatttcctgagtaataagagtgccttgttattcatggtgggtccctagaaccacacctgagttaatgctaatgaggtgacacaggatagggtttgttcacaccagaaagaccaaccatgtgattaaagggttggggcttagagccatgggctatcacataacctccatggaaggaagaggagaagggcgggagattgagcttaatcatggggccagtgattctatcaatcatggctattcaatgaaaccccagtaaaaaccctggacactgaagtgccatcaaagt

SEQ ID NO: 3784 - DNA, 2001 bp, Homo sapiens
gagagttctttcttcacctttttagaggaatctttctggttgggtcctgtccatgggttcccccatccatggttatatctatattcctcgggctacacccagttgccctaggctgaggtttatcctaatatgcctaattcctctttgaactaggcctttcctcaagccaggagctcaggaaaaaataacaaatgattctactttgactatcttaacacaattgcacaaactattttggagtacttcgtctgatcatttttttgtatatgttggaagcgctcgtgtcacatcataacacctcagtgcatatattagagataatcattctgtgatgattcattttctgtgtcaacttgaccgcgccacagtgcccagatatttggccaaaagttattctggatgtttttgtgggagtgtttttggatgagatttgctttttaaatcaatggactctgagtaaagcagactgccccccatggtgtggtgggccacgccaaatcagttgaaggcctgaatagcacaaaaggctcacctcccctgagcaagagggaattctgccagccaactgccttcaaatttcttctgaaacatcagctcttcctggttcactagcagactgtctttggacttgaactgaaaccctttcctacatctctggccagttagcctcccgtgtcagattttggatgtatcaggcttccacaattgggtgaggcgattcctttagaataaatctctttacacacacacacacacacacacacacacacacacacacacacgtgtacccacacacacgtgcatatgcacacacacacacgcacacatccatcctattgcttctgtttctctggagaaccctaatacaaatttgcatgtcattaaatatcactagtgatgtagctaagcattcaaaatactaagaatgtggtcatgggcttcctcaattaagaattcagaactgggagctcgtaagttcactgaaattactgtatgttaaagtaggagcttacgcctatcatagggcaaatagcgcaaacatttttggagttatctccaatggcacaaaaggccatttgtatgaacatatatatttcaaccccctttgaactctgtgagttaaaaataaaaaattaaaatgtatcagtatcaacataatcattaataatgttggcctctttccatttaatcccttctgtctcacaactaaaagatctgctaatgagtttttattttgaaaagagcacctggtactaatttcacatagaaataacatccttagtaaaaagagattttataatacaacagagtaattccttcatcatcaaaatgccttattaagtgtccttttacatgcaatactctacaggtgttataaaaagaaaaacctttccttaatagtttataatatgagctatcacatgttaataactaataattatcatttattgagtacctgctatgtatcatactgttttaaatgcattatgggtataaatttttattattgtgacaaatctgctagatagtgttatgtaataaagaatttggtctttttcctggttcctgggaaagagactaaattcttggaatttcctgagtaataagagtgccttgttattcatggtgggtccctagaaccacacctgagttaatgctaatgaggtgacacaggatagggtttgttcacaccagaaagaccaaccatgtgattaaagggttggggcttagagccatgggctatcacataacctccatggaaggaagaggagaagggcgggagattgagcttaatcatggggccagtgattctatcaatcatggctattcaatgaaaccccagtaaaaaccctggacactgaagtgccatcaaagttcctggttgactataaacactgctatggactgaatgtatcttcccaaaattcctatgttgaatcccaggtctccaatgtaacagtatttataggggaggcctttggggggtaaaaagcaatgctg

SEQ ID NO: 3785 - DNA, 801 bp, Homo sapiens
acatgcctgtagtcctagctacttgggaggctgaggcacaagaatcacttgaacctgggagatggaggttgcagtgagccaagatggtgccactgcactccaatgtgggtgacagagtaagactccatctcaaaaaaaaaaaaaaaaaagtataaggaggatgtgcataggttatatgcaagtacttgccactttagatcaggggcttgagcatctgtgaattttggtattcacagggggtcctggaaccaatcccccatgactactgagggatgactgtactaaccactcctccaagtagcatggagcagctacttgggagcagtgagcagagaagcctgtaggaagtgtgtgtgaagtgtgagctctgctagcatccaaagaaagagaggaagcaaaacgactgacttcccggccctgcctcccctgccatgtcagatggaagcttggagactgacccttgaaagctccaactaaggaccaaaagagagtcaggtgtggagagcttagtgggccctaacatgcccaccacacacaagggcagtgccaggcagtgtgctgggccccaggagaagccggagaaaaatgaggcaatattttagtctgctttgtgttgctgtgacagaatacctgagactgggtaacttataaagaagagaaatttatttcttaacagttctggaggctgggaagtccaagatcaaggcaccagcaggtctgttgtctggtgaagacccagtctttggttccaagatggcaccttgaatgctgcattctccggggaatggggtgggggacttg

SEQ ID NO: 3786 - DNA, 2001 bp, Homo sapiens
ctgtcaccaggctggagtacagtggtgtcatcttggctcactgcaacctccacctcccagtttcaagcaattctcctgctcagcctccccagtagctgggactacaggcacgcatctccacacccagctaatttttgtatttttagtagagatgaggtttcaccatgttggccagaatggtctcaatctcttgacctcatgatccacctgcctcagcccccaaagtgctggcattacaggtgtgagccactgggcctggccctagagaattttttaaatggatggttgcattcatattgaacatgtgcagactttttccttttcgttattctctaaacaatacagtacaacaatttacatagcatttatattgtataagctattacaagtattctagagatgatttaaggtatgcaggagcagccgggggtggttgctcacacctgtaatcccagcattttgggaggctgagacgggtggatcacctgaggtcaggagtttgagaccagcctggccaacatggcgaaaccctatctctactaaaaatacaaaaaaattagctgggcatggtggcacatgcctgtagtcctagctacttgggaggctgaggcacaagaatcacttgaacctgggagatggaggttgcagtgagccaagatggtgccactgcactccaatgtgggtgacagagtaagactccatctcaaaaaaaaaaaaaaaaaagtataaggaggatgtgcataggttatatgcaagtacttgccactttagatcaggggcttgagcatctgtgaattttggtattcacagggggtcctggaaccaatcccccatgactactgagggatgactgtactaaccactcctccaagtagcatggagcagctacttgggagcagtgagcagagaagcctgtaggaagtgtgtgtgaagtgtgagctctgctagcatccaaagaaagagaggaagcaaaacgactgacttcccggccctgcctcccctgccatgtcagatggaagcttggagactgacccttgaaagctccaactaaggaccaaaagagagtcaggtgtggagagcttagtgggccctaacatgcccaccacacacaagggcagtgccaggcagtgtgctgggccccaggagaagccggagaaaaatgaggcaatattttagtctgctttgtgttgctgtgacagaatacctgagactgggtaacttataaagaagagaaatttatttcttaacagttctggaggctgggaagtccaagatcaaggcaccagcaggtctgttgtctggtgaagacccagtctttggttccaagatggcaccttgaatgctgcattctccggggaatggggtgggggacttgctgttggcagaagagtccaggaacaaaaagagagagaacccactcccaaaagcccttttagaaaggcattaagcccacccatggcctaattacctcttaaaggctccacctcccaatatcattacattggcaattgaatttccacatgagttttggagaggacaaacattcaaaccatagcaggcaggcagactaagttctttccttctctaaagatggcaaccagttattttatagctgtgaagacagaggagcagagaagctctctgtcaccaacagcttgcaagtaggacacactctgcacctctcacctgtcacaactttgcctggcccagggagctccaatagctttatcagaacttcagatttttgtaagagaagtgaccagatgtagatgaaattgtccttgactttcccaataagtgccccagctctttttacatataaggtgtaacttggctatgtaacctagctagcaatctcttcaagctcctatggctttttaaaagatgagccagtgaggctgggcgcagtggctcgagtttgtaatctcagcactttgggaggctgaagtgggtggatcaccttagatcaagagttcaagaccagtctggccaacatggcaa

SEQ ID NO: 3787 - DNA, 2001 bp, Homo sapiens
tatagcaatggatagaggaatgatctgggaatttagagtcctgtccaccaaccgcatccacaactgcgtaagtcattttatttgttgaacttcagtttcgtcattgggagaaacaagattgtaccagaagatttttatcaaacttaactgtatactgccaaaacacagtaccacaaactggtggcttaaacaacagaaatgtgcttcacagttctggaggctgaaagtctgaaatcaaagtgttggtggggttggtcccttctgaggactgtgagggagaatctgttcctcgtctctctccttgcttctgtagcctcaggtattccttggtttgtagatgactgtcttttccctatgttttcacattgtactctctccatgcatgtctgtctctgtctaaatttcctctttttttttttttttttgagacggagtctcgctctgtcccccaggctggagtgcagtggcgcaatcttggctcactgcaacctccgcctcccgggttcaagcaattctcctgcctcagcctcctgagtagcccaccaccacacccggctaatttttttgtattttttttagtagagatggggttttaccatgttaaccaggatggtctcgatctcctgacctcgtgatccgcccacctcggcctcccaacgtgttgggattacaggcgtgagccaccgcacccggccaaatttcctctttttaaaaggacatcagtcacactgagttacagcctgccctagtgacctcatcttaacttgatcatctgaaaagaccccattttcaaataaagccaccttcataggtactgggggttggtatgtcaacatcttttggtagggacagctttcaatccatacactaactttcttaaaaaaaaaaaaaaaaagaaagaagaatatatgtgaacctaaaagtaaacaggaacatctaccaagaggagcgggaatgagtgttggtaggtgggtaggagaccacagttgcccacctagccggatctctgcctaactgcaggtgttctacaggctccttccatagagatgacaggatgcatggaaggaagagcaccctggaaggaaaacacacagttccagaggcctcttcaaacagtaccagtaatgcatacatagaagtgcaaaggtgtgtacagatttatttgttccctatagatacagagccagcagtacttaagcacataaatccagcttttcatcaatgagaagccaaatgagtctctcattcatttattactggatccacctgtctatataaagcccatcttcattttgcctgcttggtaaaaaaggaaactctcattggctcacctagctcttagactataagaaataaagtctgaatctttcatgagctgcatgtctaggccagaacccagaaaatggactgtgtcctgaccaaaggtcagttattttctgcctttgcctttcactagcattttaccttggcctttttttgctcccatcctatgtgaatttcccatgcctctcctcagacacacactctctgtagagagatgcaaaatctttatggagtaacaacctttgtaacaatgaaaaaattcctcccctgatgacttgggacagattggagccaaaccatttccttcagtccctgagcacattgtttccctccagtgacttctgcaatccagaaacagctgcaaattccagtaaaacaatgttctgatccaatccctcaagccatctttacccttttgtttttctctctggagggaggaaagaaaaaatatttgaaaacctgccatggtgcgttatttccaagcgtctgttgatggaggtgtgagccaagaagccctttttattggaggaaagaaggagagagtaaaaatggaagcaagggagatatgaaaaaatgatggaaaagggcatggagaaacatctcagagagtggaataaagttatgcaatggaaaaaaaatgagcaaaaacattgcctatacaatgcaactgaaatgtgc

SEQ ID NO: 3788 - DNA, 801 bp, Homo sapiens
cagcctgccctagtgacctcatcttaacttgatcatctgaaaagaccccattttcaaataaagccaccttcataggtactgggggttggtatgtcaacatcttttggtagggacagctttcaatccatacactaactttcttaaaaaaaaaaaaaaaaagaaagaagaatatatgtgaacctaaaagtaaacaggaacatctaccaagaggagcgggaatgagtgttggtaggtgggtaggagaccacagttgcccacctagcctgatctctgcctaactgcaggtgttctacaggctccttccatagagatgacaggatgcatggaaggaagagcaccctggaaggaaaacacacagttccagaggcctcttcaaacagtaccagtaatgcatacatagaagtgcaaaggtgtgtacagatttatttgttccctatagatacagagccagcagtacttaagcacataaatccagcttttcatcaatgagaagccaaatgagtctctcattcatttattactggatccacctgtctatataaagcccatcttcattttgcctgcttggtaaaaaaggaaactctcattggctcacctagctcttagactataagaaataaagtctgaatctttcatgagctgcatgtctaggccagaacccagaaaatggactgtgtcctgaccaaaggtcagttattttctgcctttgcctttcactagcattttaccttggcctttttttgctcccatcctatgtgaatttcccatgcctctcctcagacacacactctctgtagagag

SEQ ID NO: 3789 - DNA, 1001 bp, Homo sapiens
atcaacagacgcttggaaataacgcaccatggcaggttttcaaatattttttctttcctccctccagagagaaaaacaaaagggtaaagatggcttgagggattggatcagaacattgttttactggaatttgcagctgtttctggattgcagaagtcactggagggaaacaatgtgctcagggactgaaggaaatggtttggctccaatctgtcccaagtcatcaggggaggaattttttcattgttacaaaggttgttactccataaagattttgcatctctctacagagagtgtgtgtctgaggagaggcatgggaaattcacataggatgggagcaaaaaaaggccaaggtaaaatgctagtgaaaggcaaaggcagaaaataactgacctttggtcaggacacagtccattttctgggttctggcctagacatgcagctcatgaaagattcagactttatttcttatagtctaagagctaggtgagccaatgagagtttccttttttaccaagcaggcaaaatgaagatgggctttatatagacaggtggatccagtaataaatgaatgagagactcatttggcttctcattgatgaaaagctggatttatgtgcttaagtactgctggctctgtatctatagggaacaaataaatctgtacacacctttgcacttctatgtatgcattactggtactgtttgaagaggcctctggaactgtgtgttttccttccagggtgctcttccttccatgcatcctgtcatctctatggaaggagcctgtagaacacctgcagttaggcagagatcaggctaggtgggcaactgtggtctcctacccacctaccaacactcattcccgctcctcttggtagatgttcctgtttacttttaggttcacatatattcttctttctttttttttttttttttaagaaagttagtgtatggattgaaagctgtccctaccaaaagatgttgacataccaaccccc

SEQ ID NO: 3790 - DNA, 1202 bp, Homo sapiens
tcactgtatcctttattttattttttaatagatggagcctcgctctgttgctcagagtagagtacagtgtctgttcacaggtgtaattacggttaactgcagccttaaactcctgggcccaaggaatcctcccacctcagtcttccaagtagctaggactacaggtatgtgccactatgcctggccacagcatcattttaatatatcctgatgttctcttatgggttagtttcatgtaaaaattgcccaaattaaatgttgagatagactggcttcctggcttacccaaagtgagccagggtaagctcacttacctttagccagaggtgagctaaaacctgaattgagcacatttcagttgcattgtataggcaatgtttttgctcattttttttccattgcataactttattccactccctgagatgtttctccatgcccttttccatcattttttcatatctcccttgcttccatttttactctctccttctttcctccaataaaaagggcttcttggctcacacctccatcaacagacgcttggaaataacgcaccatggcaggttttcaaatattttttctttcctccctccagagagaaaaacaaaagggtaaagatggcttgagggattggatcagaacattgttttactggaatttgcagctgtttctggattgcagaagtcactggagggaaacaatgtgctcagggactgaaggaaatggtttggctccaatctgtcccaagtcatcaggggaggaattttttcattgttacaaaggttgttactccataaagattttgcatctctctacagagagtgtgtgtctgaggagaggcatgggaaattcacataggatgggagcaaaaaaaggccaaggtaaaatgctagtgaaaggcaaaggcagaaaataactgacctttggtcaggacacagtccattttctgggttctggcctagacatgcagctcatgaaagattcagactttatttcttatagtctaagagctaggtgagccaatgagagtttccttttttaccaagcaggcaaaatgaagatgggctttatatagacaggtggatccagtaataaatgaatgagagactcatttggcttctcattgatgaaaagctggatttatgtgcttaagtactgctggctctgtatctatagggaacaaataaatctgtacacac

SEQ ID NO: 3791 - DNA, 20 bp, Homo sapiens
ttccctaaacctcacccaca

SEQ ID NO: 3792 - DNA, 20 bp, Homo sapiens
aggcgtagagcacacacaaa

SEQ ID NO: 3793 - DNA, 401 bp, Homo sapiens
ttccctaaacctcacccacatctttgtgtgtgtgtgtgtgtgtgtgtgtgtgtgtgtgtgatggagtcttgctctgtcgcccaggctggagtacagtggtgtgatctcggctcactgcaacctccacctcccaggttcaagtgattctcctgcctcagtctcccgagtgctggcaccagccaccacgcctggctaattttttgtatttttagtagagagggggtttcaccatattggccaggctggtctcaaactcctgaccttgtgatccacccacctcagcctcccaaagtgctgggattataggcgtgagccactgtgcctggcccacccacatctttataaataaattagtcccttaaactcaccttaattatctagtttgtgtgtgctctacgcct

SEQ ID NO: 3794 - DNA, 801 bp, Homo sapiens
tggaattcaactatatgctcagcaaaaggaaataatacagatgaatatatacatatatatgtaattttcccccctacaatatggctcttaaattcaagccaactacttcatctggtactcaaccaaagaaacagccatggccatctgttccaactctggagggaaaactggctatgttgagtttactgagagatggcacagaatacataaaactctgtaatctgttgtatgtgggtgatgaaagggacttttaatggtaatttttttccatacatgagttttgtcacacatgttgactttagaactcaaactccaagcacatgcaacaccactgctacacactattatgtgtcatttcaagttgtcaggctcaagcatacatgaaaaatgactcctaacaaaatccatactactcgaagactaatttggggactgtttaggcagcctcctagctgcaacagctgcattaccatgttcccttgaataaattccttctgtcaatactggcattgttgacatcttgaattatttattttaaaacatacttacttactgagcatctactaacccactaggccttgtgctcagttctagggatacaggagtgaataaaacaggctcggtctctggtctcaaggagttcacattctaggagaattatcagatacattgatcaattaatcacacaaatttatgacgtttatgaagtttttcaacaaatatttattaagagctaactatgtgccaggcattgtactaagcactggagctaatactgtcaaaaagacaaataaaacaaga

SEQ ID NO: 3795 - DNA, 23 bp, Homo sapiens
ttttcttccttcccaaagtcatc

SEQ ID NO: 3796 - DNA, 23 bp, Homo sapiens
aaatcagcaaacttcagcctctt

SEQ ID NO: 3797 - DNA, 401 bp, Homo sapiens
ccatgtctataatttttaagggtacagttcattagtgttaagcgtctgcacattgtttgcaatagatttccagaacttttccatcttgcagaactgaaactctgtacccattaaacaactttccattttctcctcttcccagccccaggaacccctgcatgagcataggagacaatgtcttacttgtggggcctaatgggytctcactgccagaaatcatatccaagcaactgcaatattgagaagggagttggctgtttcatatatcctatttggggaagtcattttgagctcttctcttcctccatccttactcccatcctccgagtctcctccttgctcagctatcaggatggtggctgtgagagataaagtcccttataggtccaaatacggattgc

SEQ ID NO: 3798 - DNA, 2001 bp, Homo sapiens
gtacccaggtctttgccctgagcaattggaaagatataattgccattaactgaaatagagaaggagctagtttcagagggaggggtgaacttgtctgggccttaattgtgagttgcctattttagacatcctaatagagatgtcctatagggtataaatgagtctggagttcagaggagatatacattagaaagttatgagaatagagatggtatttaatgccatgaatctggatgagaccaccaaggcattgagcatggagggaagagatcgaattctggggactccaacatttagaggtcagggatatgagaagaaatcagcaaaaagaactgagaaggatcagccagaattgcagagagataaccagttagtgtggtttcttggaggccaagagaagaaagtgtatcaaaaaagagtggtagataaactgtcaaattttgattggcattatttggcaaaggtataggattcatccatgaaagtggataaaaggacacaatttagattgagtactcaggaaagtggcacttatattgaagattacaaagaaagaaggccagtgacaatcaccgatgcagttttcttccttcccaaagtcatccttgcttcatcccaatgatgtctctgctcagttgcaggtgcaatccgtatttggacctataagggactttatctctcacagccaccatcctgatagctgagcaaggaggagactcggaggatgggagtaaggatggaggaagagaagagctcaaaatgacttccccaaataggatatatgaaacagccaactcccttctcaatattgcagttgcttggatatgatttctggcagtgagaacccattaggccccacaagtaagacattgtctcctatgctcatgcaggggttcctggggctgggaagaggagaaaatggaaagttgtttaatgggtacagagtttcagttctgcaagatggaaaagttctggaaatctattgcaaacaatgtgcagacgcttaacactaatgaactgtacccttaaaaattatagacatggtacattttatgtgcgcttttttaaccacagttgaaaattttttttgaagaggctgaagtttgctgattttctttgagacttactgcatcactcagtatcagaaaatctaaaaacagggggactgtgcaactgatgaaaccaaatccctcattatggtgtgtttctgtgttagacaccataatcccaaattgcacaggtctgcctttccttaaaggatgtaactgactggactaagttgtgtaggaatccaattagaaaaataaaccagtactattaactatctgaaaatcaggaaaagaatgtggcatgtgtattacagggtttggattactaaagcacgcagtagataaatcgaagggaggtaaactccaagggagaacccagaaggatgagctttgctttttttttttttttttaatctgttttacatattaagctaacacgatttctttttttaaaaaagtgttcctggtcagaaaaccactgccctggaggtcatctataaggagtgagattcctagagactttccttctagtttataaatgtattaaaaatttttcacttttacaagttgctattactcttgtagtcagatataataataaattgaaatgatttttttttgagatggaatttcactcttgttgcccaggctagggtgcaatggcacgatcttggctcactgcaaactctgcatcccaggttcaagtgattctccttcctcagcctcccaagtagctgggattacaggtgtctgccaccatgcccagtgaatttttttgtatttttactagagacggagtttcaccatgttggccaggttggtctcgaactcctgacctcaagtgattcgcctgcctcagcctcccaaagtgctgggattacaggcatgagccaccatgtctgacctgaaatgatttttttttaatttccagttttattttacatacaggggc

SEQ ID NO: 3799 - DNA, 2001 bp, Homo sapiens
ctgggccttaattgtgagttgcctattttagacatcctaatagagatgtcctatagggtataaatgagtctggagttcagaggagatatacattagaaagttatgagaatagagatggtatttaatgccatgaatctggatgagaccaccaaggcattgagcatggagggaagagatcgaattctggggactccaacatttagaggtcagggatatgagaagaaatcagcaaaaagaactgagaaggatcagccagaattgcagagagataaccagttagtgtggtttcttggaggccaagagaagaaagtgtatcaaaaaagagtggtagataaactgtcaaattttgattggcattatttggcaaaggtataggattcatccatgaaagtggataaaaggacacaatttagattgagtactcaggaaagtggcacttatattgaagattacaaagaaagaaggccagtgacaatcaccgatgcagttttcttccttcccaaagtcatccttgcttcatcccaatgatgtctctgctcagttgcaggtgcaatccgtatttggacctataagggactttatctctcacagccaccatcctgatagctgagcaaggaggagactcggaggatgggagtaaggatggaggaagagaagagctcaaaatgacttccccaaataggatatatgaaacagccaactcccttctcaatattgcagttgcttggatatgatttctggcagtgagaacccattaggccccacaagtaagacattgtctcctatgctcatgcaggggttcctggggctgggaagaggagaaaatggaaagttgtttaatgggtacagagtttcagttctgcaagatggaaaagttctggaaatctattgcaaacaatgtgcagacgcttaacactaatgaactgtacccttaaaaattatagacatggtacattttatgtgcgcttttttaaccacagttgaaaattttttttgaagaagctgaagtttgctgattttctttgagacttactgcatcactcagtatcagaaaatctaaaaacagggggactgtgcaactgatgaaaccaaatccctcattatggtgtgtttctgtgttagacaccataatcccaaattgcacaggtctgcctttccttaaaggatgtaactgactggactaagttgtgtaggaatccaattagaaaaataaaccagtactattaactatctgaaaatcaggaaaagaatgtggcatgtgtattacagggtttggattactaaagcacgcagtagataaatcgaagggaggtaaactccaagggagaacccagaaggatgagctttgctttttttttttttttttaatctgttttacatattaagctaacacgatttctttttttaaaaaagtgttcctggtcagaaaaccactgccctggaggtcatctataaggagtgagattcctagagactttccttctagtttataaatgtattaaaaatttttcacttttacaagttgctattactcttgtagtcagatataataataaattgaaatgatttttttttgagatggaatttcactcttgttgcccaggctagggtgcaatggcacgatcttggctcactgcaaactctgcatcccaggttcaagtgattctccttcctcagcctcccaagtagctgggattacaggtgtctgccaccatgcccagtgaatttttttgtatttttactagagacggagtttcaccatgttggccaggttggtctcgaactcctgacctcaagtgattcgcctgcctcagcctcccaaagtgctgggattacaggcatgagccaccatgtctgacctgaaatgatttttttttaatttccagttttattttacatacaggggctacatgtgcagatctgtgagagtggagctaatttcagagatcagtgctggggaataaatagagaggtaaatggaacatgggaatattgcatgat

SEQ ID NO: 3800 - DNA, 2001 bp, Homo sapiens
agtcaggtgtaaaacacatgtgattgttaattttgaattagaaattgaagatctctcttctatatccaggattattctcaaggggttccttgctgatccaagtgtgatgggctgaataggtccccaggtccccaattcacatgttgaagtcctaatccccagtacctcagaatgtgactgtacttggagatagagtcttttaaaaagtaatgaggctaaaatgaggtcattagggtgagacctaatctaatatgactggggtcataagaagaggttaggacacagaggaaagtccatgtgaagacataggaagaagacagccatctgcaagccaaggagagagaccttggaaaaaaacaatcctgccagcatcttgatctaggacttctagcctccacaattgtaagaaatacatttttgctgtgtaggtcatctaatctatggtagtttgttatgatagccctagcaaactaatataccaagtattttcaagttttgttttgttttttgagatggagtctcactctgtcacccaggctggagtgcagtggcatgatctcggctcactgcaacctccacctcccaggttcaagcgattctcctgcctcagcctcccaagtagctgggattacaggtgccctccaccacgcccagctaatttttagtagagacaggttttcaccatgttggccaggctggtctcgaactcctgatctcaagtgatccacccaccttggcctcccaaaatgctgatattacaggcgtgagccaccacgcccagccccaagtatttttttaaactgcatagaatgggcctattttcatgtcatttgtgtacaaagaattgcaaaattagtattcaaaagaaagacttgtattatattgttgggtggctctaaagccttaggtcaaagtgtggcttaaaacaatacaccctaaaaaggctcatccataatgtcagagaaaacacctgaactgccttaggctttgtctcagtgtccgcccaaattctacctccactggtggatgttcaaaacccatcctatattttacaaggtagcagagaatagtgtgctaatgactggaatgagatagacttggatttgaatgccagctccatgactttactggctacatgatcttgggcaagttaatgtaattgtataagcctccactcccttatctataaaataagactccactcccttatctataaactaagacttggtcaaagtgtcagaggcatttgaaccagagcaactccatcttgaataggagctgggtaaaataaggctgaaacctactggcctgcattcccagatggttaggcattctaagtcacaggatgagacagcaggtcggcacaagatacgggtctttcccttgctgataaaacaggttgcagtacagaagctggcttaaacccaccaaaaccaagatggccatgagagtgacctctggtcgtcctcactgctacactcccaccagcaccatgacagtttacaaatgccatggcaacatcaggaagttaccctatatgatctaaaaaggggaggcatgaataatccaccacttgtttagcatataatcaagaaataaccataaaaacaggcaaccagcagccctcggggctgctctgcctatggaatcgccattcttttattcctttactttcttaataaacttactttcactttattgactcaccctgaattatttctttttttttttttttttgagacggagtctcgctctgtcgcccaggctggagtgcagtggcgggatctcggctcactgcaagctccgcctcccgggttcacgccattctcctgcctcagcctcccgagtagctgggactacaggcgcccgccaccacgcccggctaattttttgtatttttagtagagacggggtttcaccgttttagccgggatgttctcgatctcctgacctcgtgatccgcccgcctcggcctcccaaagtgctgggattacaggcacc

SEQ ID NO: 3801 - DNA, 22 bp, Homo sapiens
ttccattcagccagtctacatt

SEQ ID NO: 3802 - DNA, 26 bp, Homo sapiens
tactgttctatcaacaataagccaga

SEQ ID NO: 3803 - DNA, 210 bp, Homo sapiens
ttccattcagccagtctacattgtgtaaatatttcaaaacatcatgttaaaaataaataaataaataaataaaacaaaatgggaatcatgataggacctaactttagggcctttatgaggattgagaaggatgatggtgtaaagcttttagtacagtattttaattttttttatttttctagaatctggcttattgttgatagaacagta

SEQ ID NO: 3804 - DNA, 22 bp, Homo sapiens
ttccattcagccagtctacatt

SEQ ID NO: 3805 - DNA, 26 bp, Homo sapiens
tactgttctatcaacaataagccaga

SEQ ID NO: 3806 - DNA, 210 bp, Homo sapiens; identical to SEQ ID NO: 3803

SEQ ID NO: 3807 - DNA, 20 bp, Homo sapiens
gcattttgacctgaccaagg

SEQ ID NO: 3808 - DNA, 23 bp, Homo sapiens
tcttttaattcgttttcgctttg

SEQ ID NO: 3809 - DNA, 1144 bp, Homo sapiens
aatcagcctatgctattaatatatggtatagaccaggagttaaagataattaaccataaagtttccaaacatataagatccaaagaggtgcatggattcttgcagttgaatccaaagctcataccatttgccacacgaagcccrttagtcaaaagacatggtgttggggcaaggaaagtaactttatttcagagaaccagcaagccaagatggcagactagtgtccaaaataaccatcttaagttaatagaattttaggcttttttatgttagaggaaaggagaattagagagccttcagttgagatcaagaggtgactgatgatcatagatacctgggtggcagttagggtccaagttggggggttgtgaagcttctttgcccttggtcaggtcaaaatgctcctatacatctttaacataacattgttacttgtgtgtacacttctttatcttcttaaagattagttttgagaagggactatcatcatccttcctttaaaaagttaggctataaattaaattcctcccatagttaactcagcctatgtacaaagataaataaaagtagttaacccaaaagatatcactatgggcatggggaggttaggagcaaaatggagctagtcatgttaggcttccttttgttactggaaaggtgtcctgatccagaccccaagagagagttcttggatctcgtgcaagaaagtttggatcaagtccacagagtaaagtgaaagcaaatttatcaggaaaataaagaaataaaaaaatggctactccataggcagagcagccctgagggttgctggttgcccattttaatagttatttcttgattctatgctaaacaaggggtatttagcatagttattatgcctctccttagcatagttattcgtgcctctcttttttagaccatattgggtaactttctgatgtttctatggcatttgtaatctatcatggcgctggtgggagtgtagcagtgaggaccaccagaggtcactctcatcaccatcttggttttggtgggttttggccgtcttcttcactgcaacctgttttatcagcaaggtctttatgacctgcatcttgtgccgacctcttatctcatcccatgacttggaatgccttagctgtct

SEQ ID NO: 3810 - DNA, 20 bp, Homo sapiens
gtgtcagcaactgcacgatt

SEQ ID NO: 3811 - DNA, 20 bp, Homo sapiens
ggcatggtggtacatgtctg

SEQ ID NO: 3812 - DNA, 368 bp, Homo sapiens; identical to SEQ ID NO: 30

SEQ ID NO: 3813 - DNA, 20 bp, Homo sapiens
tgcacgatttctccctattc

SEQ ID NO: 3814 - DNA, 20 bp, Homo sapiens
gaggttgagcaagaccctgt

SEQ ID NO: 3815 - DNA, 287 bp, Homo sapiens
tgcacgatttctccctattcagccagtagggaatctagagcaattctattatctagtacaactttagcaagagaatttaaagtctgttatgcaaccatagcctttgcaatagaatctgctatagagatgattataaggaatttccttccttccttccttccttccttccttccttccttccttctttctttctttctttctttctttctttctttctttctttctttctttcttctttctttttctttctttctttccttctttgagacagggtcttgctcaacctc

SEQ ID NO: 3816 - DNA, 2015 bp, Homo sapiens
caccaaagagttgaacgctgtgcactgggtccagtgcagtttcccaccactatgaacaggagaaccttggaataccagtcttgatgatgctgcctgtccttgctcacactgatagtaaacagggtaaatattattctcatggcaattggaataaaaatgaaatggagaatggtgacctgcagtgggcagcagtcctggtctgtgttggtatgaacatgttcatgctgaaaaggaggctgcaatccccccatacagttgctctgtgacctaggggactgtttcttgaacttgaagttgaattcttaaattggttcctgtctgttcccaactggaagtgttttctggaatgattggattctcagagactcgagcaacaaatggctcatacatatgctacagagatcagatcacacaagcttggagacaatgtagtttctccactgactctggtggcaggtgcaaaggcaggaagcatccagaggggaatgccttcggtacaacctggtccaaaaactagccgtgcaagtgacaggagctcagtgcaaaacaatacatttatttaacaattcccttcttttgctcgggttctctcctaggtcagagtgtgaccaaaatctaaggctttagagcaccactttcaattaccatcatttcggtttctcgtctcagcatgtcattcataggttatggtatcctcatgatcatgcatttctttgagttttgtcattctagccaaagagtaacaatttgacattctacaaatggctgcatgttagcaaacatttaaaacttttgagagaatacagtgcaccaaggtgaccactgtcatcgggaggataataccaacagtttgcagatgccccttagctagggtccccatgagctaaacaaacaaaaatcaaataaatcaaagaataaaccagatgaagagtgtacctattttaaccaagcggcctgttcattaatcctctgcaaatgagtctctataatacccagcatattcatccatgtgcaaaacgtgtcagcaactgcacgatttctccctattcagccagtagggaatctagagcaattctattatctagtacaactttagcaagagaatttaaagtctgttatgcaaccatagcctttgcaatagaatctgctatagagatgattataaggaatttccttccttccttccttccttccttccttccttccttccttctttctttctttctttctttctttctttctttctttctttctttctttcttctttctttttctttctttctttccttctttgagacagggtcttgctcaacctcccaggctcaagcaattctccctacctcagtctcccaagtggctgggagtacagacatgtaccaccatgcccagctaaaattttaaaatatttttgtagagacaaggtctcactaggctggtctcaaactcctaggctcaaatgatcctcccacctcagcctcccaaagtgttgggattacagatgtgagccaacacacccagtcaggaatacatttcaaattattgcctcatttatatttactccaagccatggaaaataaatctaacattggcccttcatgctcaatccatcaaaggcataaggttgcccatgtgtaaagttggctgcaaaatcctccacaaataaaagtataccccacggatagacataaggccccttttccagttctgttgttcatggatacattacctggaatggtgaaattagcaatttcaaaccaagggcctgaggcagaattacgggttgaaagagtgctatcatatcctgacacataagtcagtttgcaagaaactccatttgggcattggtgcaaacctgtcttgtgatatactcattggtcattgttcttgtatcccattattggattaaattaaaacagggagtgagagcaagtcggtttagaagtcttactactagtacaatttgaacaacagttatgttaggaatgttgctaacattacccaccaggttaactaaa

SEQ ID NO: 3817 - DNA, 22 bp, Homo sapiens
gagagaaagagagggagaaagg

SEQ ID NO: 3818 - DNA, 21 bp, Homo sapiens
gggccattggacctttatagt

SEQ ID NO: 3819 - DNA, 128 bp, Homo sapiens
gagagaaagagagggagaaagggagggaggaagggaggaagggagggaggaagggaggtaggaaggaaggaaggaaggaaggaaggaaaagaaagagaaagaagaccactataaaggtccaatggccc

SEQ ID NO: 3820 - DNA, 20 bp, Homo sapiens
ccactacacccagccattta

SEQ ID NO: 3821 - DNA, 20 bp, Homo sapiens
ccagtgccatgcttcttgta

SEQ ID NO: 3822 - DNA, 612 bp, Homo sapiens
gtgctatcatatgtaatttgacttggatcatggagttcctttaaattgcatatcttaacaatttcagtactggctgacttgtactttcttggtatttaattaattcttgtccygcttagcagttttacaaaccagtaaatcttttcattagaggtctgggggattcttacacagtctagtgatatgaatttaaggctatcagaagcctgtacttatcagagtctttccatccttctcagtccattttgcattgctgtgaaagaatacctgaggctgggtaatttaggaaggggtttatttggctcagggttctggaggctgtacaagaagcatggcactggcatttgccccagtaagaaccccaagaagcttccaatcatggcagaaggaggagggtagctggcatgtcacatggcaagagaggaagaaagagagagacaggggaaggatgccatgctcttttaaacaatcagctgtcatgtaaactaatagatcaagaactcatttgttaccacagaaatggcaccaagccattcacaaggggtctgccccctttacccaaacacctctcattaggccccatttccaaaattggtgatcaaatttcaacat

SEQ ID NO: 3823 - DNA, 20 bp, Homo sapiens
gaggaaccaggcagagagaa

SEQ ID NO: 3824 - DNA, 22 bp, Homo sapiens
ttccaaaattgtatgggatttc

SEQ ID NO: 3825 - DNA, 401 bp, Homo sapiens
caggcagagagaaacaaacatgctccaaattttgttcacaggagtataacttactcaattattaaagactgtaaatagctcaaaataaaagtttctttaactctgaaaaacaaaacaaggatcagcaatgttttaagcaacagttaataaaagattacttcagctttctattagttcagtccattccattaactcttgttytgcttgatattcatgaacattttaactcttcatgagtcctatacgtttttccagcattcaaatgtcacaatctccaaagttatcagaaacctgcatttgagagcacctgtcaaagttccatagctgattaaaaccatcttttgaagaggatcaaaacaagacaacagttgtctgtgaataacaaaatgttcagggtactt

SEQ ID NO: 3826 - DNA, 18 bp, Homo sapiens
agtgcggtggcatgatct

SEQ ID NO: 3827 - DNA, 22 bp, Homo sapiens
ggtgaatgtaaatggcatcaaa

SEQ ID NO: 3828 - DNA, 822 bp, Homo sapiens
tggcaatgtgaacctgttgagcagttatacttcttcaatggctagttttgtttaataagtaattcaagcataattgtaaagaatgagtaaataaggtgaatgtaaatggcatcaaaatttataaataaatttatcatagtttccaaaatctttttcagcaacttcaaattttaaaatcatgttaaattaagtaattgaaaattactttattttcaattcattttaaattcaataaaatactgaaacattaattattaagcatagctttagtttatatacttcaacatcttgtttttaatacagtatatagaagttaaatatatttggatctattaagaaacataaaaatctggctgggcrtggtggctcatgcctgtaatcccagcactttgggaggccaaggcgggcagatcacctgaggtcaggagtttgagaccaacctggccaacatggcgaaacgccatctctactaaaaatacaaaaattaggcgggcatggtggtgtgcgcctgcaattccagctacttgggaggcggagacaggagaattgcttgaacccaggaagcagaagttgcagtgagctgagatcatgccaccgcactccagcctggatgacagagcaagactctatctcaaaataaataaatggcttaataaataagaagaaacataaaaaattgaggaaacatttctttctaaaaattaagaaattgctttcatctacaatactgatataaaacaggttaaaatggaatactttcctgatgttcactggaaattaatttactaagagttaaaatttgataatggctatattaaatat

SEQ ID NO: 3829 - DNA, 2001 bp, Homo sapiens
ttgtgacttctggactgagtccagtttttgttgtgacttctgaaccgaatccagttaaaaaatttgctcaaactcagatagctcaaaacacaaatttgtggcacttcagaatctaagagcgaatttgtccaggatccccagttgctgcaagagagcagtggacacagtgggcccagcaggcaccttgcttggtcgctccatcctcctgggggtcattagaagctctactttgtgggcatttttggggtttttttgtttgtttatttcttgttttgagacagggtctcattctgttgcccaggctggagtgcagtggtgtaatcacggctcactatagcctcgaactcctgggctcaggtgatcctcccacctcagcctccctagtagctaggactacagacacgtgctcccacacccagctaattttctactttggatcctgcttctgatgccattggttaaaagaaaagctttaggcaaattaaatttaacacagtttaattgagtaaagaaagattcttgaatccaacagtccccaaaacacaaacagactcagagtgactccagggctgccacatttatgccacatttattaggtaacatttatggacagaaaaaggaaattgacctgtagaaagcataagggaggtacagaaacggctggattggctacagctggggcctttgccttatttgaacctggtttgaacagttggctgcctgtggttaactgaaatttggctgctgtgattggctgagactcagttaccagtctgtttatgcatcaaattaggttacagttcactgtgtatggagaaacctttaggccagacttaaaatatatacagaggcagctttaggccaaacttcatttaacagcatctagataattttcttcaaaaatttttgaatgatccatggcgtagcctctttcttttgttcaatgtatctatagagggaaatgttttcacaactccatcattatactcttagtttccccaaatagtttaactggtggaaagggcagcaatactcaaagccattaaaccaagcagaacttgcactatcaatttcagtctgttctgaaggtattcatatatggctaaggctttttctgcaaatgtagaaaagcttaccctgatattaagttgctaggaaaatcatgtatgcatcagtgtgtcttccgtgttacatggatatcactcatatcaaagtaacatgcattgctgcaaaaagaattgtaactgttatgtactgaattgtgtccccccaaattcatacattgaaacccaagcccacaatgcgatagtatttggagatggggcctctgggaaggaattaggtttagatgaggttaccagataggttcttgtacgaggccattcttgtgtggccataaagaaatacatgaagttgtggataatttataaagaaaagaggggtatttggcttatttggcttaccattccgcaggctgtataggaagcatggagctggcatttgcttctggtgagggcctcaggaagttaaaatcatggcagaaaggaagaggagccggcacatcacatggtgggagtgggagcaagagagaggaggacagtgccatacactttcacttattattattgttattattatcattttgagatggagtctcgctctgtcacccaggctggagtacagtggcgcgatctcagctcactgcaagctctgcctccccggttcaagtgattctcctgtctcagcctcctgagtagctgggactacaggcacccgccaccatccctggctaatttttgtatttttagtagagacggggtttcatcatattggccaggctggtcttgaactcctgaccttgtgatctgcctgcctcggcctcccaaagtgctgggattataggtgtgagccaccgcacctagcctccatccacttttaaatgaccagatatcacatgaactcagagcaagagcttacttatcatcaaggggatggtgctaa

SEQ ID NO: 3830 - DNA, 23 bp, Homo sapiens
gagaggagatagcagacagcttg

SEQ ID NO: 3831 - DNA, 20 bp, Homo sapiens
catgttatggcactgggtga

SEQ ID NO: 3832 - DNA, 285 bp, Homo sapiens
gagaggagatagcagacagcttgcagtctctctctctctctctctctctctctctccctctctctctctctctctctctctctctctctctccaccatgtgaggacacagagggaaggcagccatctacaagccaaggagagagtccttacaggaacctgaccgtgctgggaccttgatactcatacttccagcctccagacatgtcagaaaataaatttttgttgtttaagccacccaatccataacatagactgggtattatgtcacccagtgccataacatg

SEQ ID NO: 3833 - DNA, 2001 bp, Homo sapiens
gttgtggataatttataaagaaaagaggggtatttggcttatttggcttaccattccgcaggctgtataggaagcatggagctggcatttgcttctggtgagggcctcaggaagttaaaatcatggcagaaaggaagaggagccggcacatcacatggtgggagtgggagcaagagagaggaggacagtgccatacactttcacttattattattgttattattatcattttgagatggagtctcgctctgtcacccaggctggagtacagtggcgcgatctcagctcactgcaagctctgcctccccggttcaagtgattctcctgtctcagcctcctgagtagctgggactacaggcacccgccaccatccctggctaatttttgtatttttagtagagacggggtttcatcatattggccaggctggtcttgaactcctgaccttgtgatctgcctgcctcggcctcccaaagtgctgggattataggtgtgagccaccgcacctagcctccatccacttttaaatgaccagatatcacatgaactcagagcaagagcttacttatcatcaaggggatggtgctaagccattcatgagggatccacccccatgatccaatcacctcccaccaggccccacatccaacactgagaatcacatttcaacaagagattgggatggcacaaacatccaaaccatattagtcctcataatgggattagtacccttatgagaggagatagcagacagcttgcagtctctctctctctctctctctctctctctccctctctctctctctctctctctctctctctctctccaccatgtgaggacacagagggaaggcagccatctacaagccaaggagagagtccttacaggaacctgaccgtgctgggaccttgatactcatacttccagcctccagacatgtcagaaaataaatttttgttgtttaagccacccaatccataacatagactgggtattatggcacccagtgccataacatgttatgctatggcagcctaagctgacttagatagtaaccatcattatgtgacataaaaggagcatagtaaagagagcacataattctagaaggggtggaggttggagagaaattaagttgagaagaggagaacaagatgtcaggaaagtcttcccatatgagatacttctagcaattgagtctagtctagaggaacaggcagttattctctaaatggtctctaagaagagctgggggccttaaaaacaagggacgtagcagtaatcttttttataggctgtgaattgctgtggaacctatagcttcaaacctatttgttttccatgaactctataatgatgtcatggtctatgccttcttcatgtacaaacatcatacagttaacccaccaccatgatagcatgtactttctgttgtcgtgttgtttcctagtaaggtgattgatttgcattgcttcaaccgggctcctctgattgatcattttctaaacaatggatgcatttacagatggttgccaggttcagcagaggaggctgtagccatcaaatagataaagtaggctcaccacattctggaattgaaaccgtgatcttggttacatcagaaggtgctctaaccaattgaacaaaccaggcctcgatgaagcaactgagagctgggggattcttatgcagaacagagcattcatacttccgcttccatatgtaccacatatgtgttcctctcaactggttttgtacatttccattgccttaaatgtattcacatagcactctttaaatactcgaagtataatgaagaaaagagaaggaactgaaatggttccattccatttctcactaggaagttgattctgtgcactctatttctgactattttctatcagcctatcactgtgggatgtaggagggaggaacaggacacaaaatgtggcataattaaaaaaagatgaagaagaaaattaaaatcattaaccattagt

SEQ ID NO: 3834 - DNA, 20 bp, Homo sapiens
aagccacccaatccataaca

SEQ ID NO: 3835 - DNA, 20 bp, Homo sapiens
ccacagcaattcacagccta

SEQ ID NO: 3836 - DNA, 401 bp, Homo sapiens
gtcccttgtttttaaggcccccagctcttcttagagaccatttagagaataactgcctgttcctctagactagactcaattgctagaagtatctcatatgggaagactttcctgacatcttgttctcctcttctcaacttaatttctctccaacctccaccccttctagaattatgtgctctctttactatgctccttttwtgtcacataatgatggttactatctaagtcagcttaggctgccatagcataacatgttatggcactgggtgccataatacccagtctatgttatggattgggtggcttaaacaacaaaaatttattttctgacatgtctggaggctggaagtatgagtatcaaggtcccagcacggtcaggttcctgtaaggactctctc

SEQ ID NO: 3837 - DNA, 2001 bp, Homo sapiens
atttttgtatttttagtagagacggggtttcatcatattggccaggctggtcttgaactcctgaccttgtgatctgcctgcctcggcctcccaaagtgctgggattataggtgtgagccaccgcacctagcctccatccacttttaaatgaccagatatcacatgaactcagagcaagagcttacttatcatcaaggggatggtgctaagccattcatgagggatccacccccatgatccaatcacctcccaccaggccccacatccaacactgagaatcacatttcaacaagagattgggatggcacaaacatccaaaccatattagtcctcataatgggattagtacccttatgagaggagatagcagacagcttgcagtctctctctctctctctctctctctctctccctctctctctctctctctctctctctctctctctccaccatgtgaggacacagagggaaggcagccatctacaagccaaggagagagtccttacaggaacctgaccgtgctgggaccttgatactcatacttccagcctccagacatgtcagaaaataaatttttgttgtttaagccacccaatccataacatagactgggtattatgtcacccagtgccataacatgttatgctatggcagcctaagctgacttagatagtaaccatcattatgtgacataaaaggagcatagtaaagagagcacataattctagaaggggtggaggttggagagaaattaagttgagaagaggagaacaagatgtcaggaaagtcttcccatatgagatacttctagcaattgagtctagtctagaggaacaggcagttattctctaaatggtctctaagaagagctgggggccttaaaaacaagggacgtagcagtaatcttttttataggctgtgaattgctgtggaacctatagcttcaaacctatttgttttccatgaactctataatgatgtcatggtctatgccttcttcatgtacaaacatcatacagttaacccaccaccatgatagcatgtactttctgttgtcgtgttgtttcctagtaaggtgattgatttgcattgcttcaaccgggctcctctgattgatcattttctaaacaatggatgcatttacagatggttgccaggttcagcagaggaggctgtagccatcaaatagataaagtaggctcaccacattctggaattgaaaccgtgatcttggttacatcagaaggtgctctaaccaattgaacaaaccaggcctcgatgaagcaactgagagctgggggattcttatgcagaacagagcattcatacttccgcttccatatgtaccacatatgtgttcctctcaactggttttgtacatttccattgccttaaatgtattcacatagcactctttaaatactcgaagtataatgaagaaaagagaaggaactgaaatggttccattccatttctcactaggaagttgattctgtgcactctatttctgactattttctatcagcctatcactgtgggatgtaggagggaggaacaggacacaaaatgtggcataattaaaaaaagatgaagaagaaaattaaaatcattaaccattagtaatcatttttaatgtgcatcatttttaaaattcgagaataacccaaggaggtaggcataatgtttagacatgatttaccagtgaaaagaagcttagagaaatgaagtaacggctggaaagtcacagctagaactcaaagtgagaattcccacccaagaaatctaactccagattctacactcctaatctccgctatgttgctttcctgaaatgaggaaagaataagaaaggagaaaattagtgacaggaaagagagagctgaataagaggggacaaagaaaggaggaaggaaatcaagcagtttctacactctggaaaataacggagcagaattaacagaagagaactactttcctcaatgctcattctactgttaaaaa

SEQ ID NO: 3838 - DNA, 2001 bp, Homo sapiens
tcagagcaagagcttacttatcatcaaggggatggtgctaagccattcatgagggatccacccccatgatccaatcacctcccaccaggccccacatccaacactgagaatcacatttcaacaagagattgggatggcacaaacatccaaaccatattagtcctcataatgggattagtacccttatgagaggagatagcagacagcttgcagtctctctctctctctctctctctctctctccctctctctctctctctctctctctctctctctctccaccatgtgaggacacagagggaaggcagccatctacaagccaaggagagagtccttacaggaacctgaccgtgctgggaccttgatactcatacttccagcctccagacatgtcagaaaataaatttttgttgtttaagccacccaatccataacatagactgggtattatgtcacccagtgccataacatgttatgctatggcagcctaagctgacttagatagtaaccatcattatgtgacataaaaggagcatagtaaagagagcacataattctagaaggggtggaggttggagagaaattaagttgagaagaggagaacaagatgtcaggaaagtcttcccatatgagatacttctagcaattgagtctagtctagaggaacaggcagttattctctaaatggtctctaagaagagctgggggccttaaaaacaagggacgtagcagtaatcttttttataggctgtgaattgctgtggaacctatagcttcaaacctatttgttttccatgaactctataatgatgtcatggtctatgccttcttcatgtacaaacatcatacagttaacccaccaccatgatagcatgtactttctgttgtcgtgttgtttcctagtaaggtgattgatttgcattgcttcaaccgggctcctctgattgatcattttctaaacaatggatgcatttacagatggttgccaggttcagcagagcaggctgtagccatcaaatagataaagtaggctcaccacattctggaattgaaaccgtgatcttggttacatcagaaggtgctctaaccaattgaacaaaccaggcctcgatgaagcaactgagagctgggggattcttatgcagaacagagcattcatacttccgcttccatatgtaccacatatgtgttcctctcaactggttttgtacatttccattgccttaaatgtattcacatagcactctttaaatactcgaagtataatgaagaaaagagaaggaactgaaatggttccattccatttctcactaggaagttgattctgtgcactctatttctgactattttctatcagcctatcactgtgggatgtaggagggaggaacaggacacaaaatgtggcataattaaaaaaagatgaagaagaaaattaaaatcattaaccattagtaatcatttttaatgtgcatcatttttaaaattcgagaataacccaaggaggtaggcataatgtttagacatgatttaccagtgaaaagaagcttagagaaatgaagtaacggctggaaagtcacagctagaactcaaagtgagaattcccacccaagaaatctaactccagattctacactcctaatctccgctatgttgctttcctgaaatgaggaaagaataagaaaggagaaaattagtgacaggaaagagagagctgaataagaggggacaaagaaaggaggaaggaaatcaagcagtttctacactctggaaaataacggagcagaattaacagaagagaactactttcctcaatgctcattctactgttaaaaaaaaaataagccaggcagtgcagcacacgcctataatcccagtgactaaggaggctgatgtaggaggattgcttgagcccaggagtttgaagctaacctgggcaacagagcaagaccttgtctctaaaaaaaattttttttaagtagctgcattgtcttgtttttctaa

SEQ ID NO: 3839 - DNA, 21 bp, Homo sapiens
aaagctcagccagagtctcaa

SEQ ID NO: 3840 - DNA, 20 bp, Homo sapiens
ggccttacagtgcctagcaa

SEQ ID NO: 3841 - DNA, 171 bp, Homo sapiens; identical to SEQ ID NO: 31

SEQ ID NO: 3842 - DNA, 990 bp, Homo sapiens
tgaatactcttcctttctttcaaaaccacattctattgctcagctcatacctgactcaaaacccaacctactgcccacagactaagatctcgacctggaattatatcctattactatctggcctcactgaccctttcaagttccaaccttattttccagccaattgtttcccatcctttctctgtgattttctgctcggccttttctcctgctcttctctgccaggaatgctcatttcctctgtgctagttcaggatcatccaagatctagcataaaatccatcttctttacaaaaaatggccctaaccttcccagctggaaatggtctcttcctttcattgatctactgtggcactgtatctagtgacacctaacagttttctacattttgccgtagttaattgtatacatattttttctccccttttacactataaggtctctgagaacagagagcatctgattttttttttcttttttcttttttgagacagagtgtcactctgtcgccaggctggagtgcagtggcacaatctcggctcactgcctcctgggttcaagcaattctcctgccccagcctcccgaatagctgggactacaggtgcacggcaccaagcccagctaatttttgtatttttagtagagacggggtttcaccatattggtcaggcttgtctcgagctcctgacctcaggtgatccacccacctcggcctcccaaagtggtgggattataagcgtgagccaccgcgcccggcctattttttcctttttgatggccttacagtgcctagcaaaatgccttgctcacagtaagtgcttgatataaatttattaatccatcagctggatggatggatggatggatggatagatggatggatgaatggatggatgggaaggaggttataggaattgagactctggctgagcttttttagccaggtagccatggcaggagaaaggcttcacctttcatgagagcgtat

SEQ ID NO: 3843 - DNA, 2001 bp, Homo sapiens
ggtggatcacctgaggtcaggagctcgagacaagcctgaccaatatggtgaaaccccgtctctactaaaaatacaaaaattagctgggcttggtgccgtgcacctgtagtcccagctattcgggaggctggggcaggagaattgcttgaacccaggaggcagtgagccgagattgtgccactgcactccagcctggcgacagagtgacactctgtctcaaaaaagaaaaaagaaaaaaaaaatcagatgctctctgttctcagagaccttatagtgtaaaaggggagaaaaaatatgtatacaattaactacggcaaaatgtagaaaactgttaggtgtcactagatacagtgccacagtagatcaatgaaaggaagagaccatttccagctgggaaggttagggccattttttgtaaagaagatggattttatgctagatcttggatgatcctgaactagcacagaggaaatgagcattcctggcagagaagagcaggagaaaaggccgagcagaaaatcacagagaaaggatgggaaacaattggctggaaaataaggttggaacttgaaagggtcagtgaggccagatagtaataggatataattccaggtcgagatcttagtctgtgggcagtaggttgggttttgagtcaggtatgagctgagcaatagaatgtggttttgaaagaaaggaagagtattcaagacagagcacagcaggagcagatagaagaacccaggtggctggtttctctgacacaggcaggaaacattcttctgcaatggtgagccaggctggatgataggggagactctacttatgaggcaggagggtctagaatgagggacagttacccagagtctgggagcatcaagccactccttcatgagtcaggcccagcaagcttgcttatgagcagtgagattagaaaacccacgggcagaaccatgtggaccgacaagaaataggtgagcgccatatgtttccaggggccagacaggtgagcatctgagcaaagacagaagccaaagcggtgcaaacctggaaggacaggagcaaggcagctcaggagctgactgggcagtagtatcgaaggcccagatacagtgtccaggcaaagggccaagagcccagtcaaggatgacagctgtattgcggagataaagcgaagaaagcacaggtttcagagtcaaacagactcaggtttgaatccaagactatcttatctgctgtgtaaacttgggcaagccacttaacctctctgaggcttctgtttccttggctaaaaaggaacataataatgtctacctcaaagagttgttataaggagtataaataatatatgaagagtgcctggcacttggagcactcaataaatgagagctattgttattatcaatatcaccctcattatttatattgaactatagagattgctgtggctcaggctgagaaataaagcaagtgagaggagtctttgccaagaacagagaaaccaccaggagggggaacgggcctctgcagaattgatcacaaaagctctctggcttatgtattactcatttgtcactgttgatttatacattcattcttatactcagtaatgccaacaccattgtcaccattgccatcattccctccaacaaaaataagaagaaccttagatttctgttaaaacagttcaacaggctgtgttttgcccctggcacatctcttcatcttttctgtggattgagctgccattggtattcagggataccacctgccccgagttgctgacaaccatctccatggtttctggccagatctcattagctaagtgaggtcaagcccagtgaggttaaataccgacaagggagagggtcgggggatacacagatggttacaggcattgggatggaatggcatggctgacccagccttgtgttaggtagaaaaccaaggtcacaaccttttgcagtctctgaggagctgcgtgacaacatatttaatcagagg

SEQ ID NO: 3844 - DNA, 2001 bp, Homo sapiens
tggatcacctgaggtcaggagctcgagacaagcctgaccaatatggtgaaaccccgtctctactaaaaatacaaaaattagctgggcttggtgccgtgcacctgtagtcccagctattcgggaggctggggcaggagaattgcttgaacccaggaggcagtgagccgagattgtgccactgcactccagcctggcgacagagtgacactctgtctcaaaaaagaaaaaagaaaaaaaaaatcagatgctctctgttctcagagaccttatagtgtaaaaggggagaaaaaatatgtatacaattaactacggcaaaatgtagaaaactgttaggtgtcactagatacagtgccacagtagatcaatgaaaggaagagaccatttccagctgggaaggttagggccattttttgtaaagaagatggattttatgctagatcttggatgatcctgaactagcacagaggaaatgagcattcctggcagagaagagcaggagaaaaggccgagcagaaaatcacagagaaaggatgggaaacaattggctggaaaataaggttggaacttgaaagggtcagtgaggccagatagtaataggatataattccaggtcgagatcttagtctgtgggcagtaggttgggttttgagtcaggtatgagctgagcaatagaatgtggttttgaaagaaaggaagagtattcaagacagagcacagcaggagcagatagaagaacccaggtggctggtttctctgacacaggcaggaaacattcttctgcaatggtgagccaggctggatgataggggagactctacttatgaggcaggagggtctagaatgagggacagttacccagagtctgggagcatcaagccactccttcatgagtcaggcccagcaagcttgcttatgagcagtgagattagaaaacccacgggcagaaccatgtggaccgacaagaaataggtgagcgccatatgtttccaggggccagacaagtgagcatctgagcaaagacagaagccaaagcggtgcaaacctggaaggacaggagcaaggcagctcaggagctgactgggcagtagtatcgaaggcccagatacagtgtccaggcaaagggccaagagcccagtcaaggatgacagctgtattgcggagataaagcgaagaaagcacaggtttcagagtcaaacagactcaggtttgaatccaagactatcttatctgctgtgtaaacttgggcaagccacttaacctctctgaggcttctgtttccttggctaaaaaggaacataataatgtctacctcaaagagttgttataaggagtataaataatatatgaagagtgcctggcacttggagcactcaataaatgagagctattgttattatcaatatcaccctcattatttatattgaactatagagattgctgtggctcaggctgagaaataaagcaagtgagaggagtctttgccaagaacagagaaaccaccaggagggggaacgggcctctgcagaattgatcacaaaagctctctggcttatgtattactcatttgtcactgttgatttatacattcattcttatactcagtaatgccaacaccattgtcaccattgccatcattccctccaacaaaaataagaagaaccttagatttctgttaaaacagttcaacaggctgtgttttgcccctggcacatctcttcatcttttctgtggattgagctgccattggtattcagggataccacctgccccgagttgctgacaaccatctccatggtttctggccagatctcattagctaagtgaggtcaagcccagtgaggttaaataccgacaagggagagggtcgggggatacacagatggttacaggcattgggatggaatggcatggctgacccagccttgtgttaggtagaaaaccaaggtcacaaccttttgcagtctctgaggagctgcgtgacaacatatttaatcagaggat

SEQ ID NO: 3845 - DNA, 801 bp, Homo sapiens
agaattgatcacaaaagctctctggcttatgtattactcatttgtcactgttgatttatacattcattcttatactcagtaatgccaacaccattgtcaccattgccatcattccctccaacaaaaataagaagaaccttagatttctgttaaaacagttcaacaggctgtgttttgcccctggcacatctcttcatcttttctgtggattgagctgccattggtattcagggataccacctgccccgagttgctgacaaccatctccatggtttctggccagatctcattagctaagtgaggtcaagcccagtgaggttaaataccgacaagggagagggtcgggggatacacagatggttacaggcattgggatggaatggcatggctgacccagcctggtgttaggtagaaaaccaaggtcacaaccttttgcagtctctgaggagctgcgtgacaacatatttaatcagaggatgccagccacagtgatcctgcaagtttccaactgatacagtttacctgctccctctacattcaattgatgctattactgcccaatccaataataagcaacaatttattaagcccttactgtttgccaggctaacgacaggccaaaatgcagggctaaagcactttacatactgtcccatttaatcctcaccacaactctataaagtcagtactattacctgctccattttaccgattaatagaagttcagagaggttaagtaacttgtctaagtccgcatagctagtaaaactgtagagccagcttgggaacatgggttttgct

SEQ ID NO: 3846 - DNA, 623 bp, Homo sapiens
gttttaaagcctcttagcctaaccctaagaccaaaacccaacctccttcaaagagaaacctgccaaccactgtgaaccaaatctatcagacaagtctcttgtgattcaaattataacccacggcccgacagcatacatgtggcctaagaaatgcagcatctcaggtcccatctggatctactgaatcaaaaccttcattttaacaaatcgcctggtgacttatatacacattaaagtgtgagaagcaccagttagcattttaatgcagagctggagatctggaatcagcaaaacccatgttcccaagctggctctacagttttactagctatgcggacttagacaagttacttaacctctctgaacttctattaatcggtaaaatggagcaggtaatagtactgactttatagagttgtggtgaggattaaatgggacagtatgtaaagtgctttagccctgcattttggcctgtcgttagcctggcaaacagtaagggcttaataaattgttgcttattattggattgggcagtaatagcatcaattgaatgtagagggagcaggtaaactgtatcagttggaaacttgcaggatcactgtggctggcatcctctgattaaa

SEQ ID NO: 3847 - DNA, 20 bp, Homo sapiens
tctttggaatcaagcccatc

SEQ ID NO: 3848 - DNA, 19 bp, Homo sapiens
gtttccagctgcctgcttt

SEQ ID NO: 3849 - DNA, 159 bp, Homo sapiens
tctttggaatcaagcccatcttttctgatttctagcctattttccttccaatggcactgtcctaaggttgtacagcttagaaaatgttaacccagtattgttttctttacttgcatgtgagagaagagaagtcaaagtcaaaagcaggcagctggaaac

SEQ ID NO: 3850 - DNA, 2001 bp, Homo sapiens
ctgaggtccctgtttcctggctggctgtcagctgggggccactctcagttcctagaaactgccgcatttcttaccacttggtccttttatcttcatagtcagcaatagagaatctcccctttgttgaattcttctcatgcttcaaacctctttgatttttttctgtctttgacctccagactcagagttaaagggctcgtgctattagatcaagcccacccagacaatctccctatcttgggaccttaattacatctgcaaaatcccttcacagcagaatctaggttgctgtttgattgagtaagtgggagaaggctcacagatcccagaggcaggaaaccttaggggcttagaattctgcctaccacaaagtgttttggttttcctggatgagctgcattgttgattgatcaatgtttttagagtcatcgaaattgagactatataagctttctcatttctgctttcatttctactctcttgctgtaagcctctcctttggtatgaaattaccaacaatgatttcaaaataaaaatggactgtcaacttccagcaaattgagcttagccctttttctcatttattgtataaactgaaagtgtaaaacaggaattgatacatagatcatttggggtttttcactgactcattagcaatgtccaggaataagtctccagatgcagagatgtttatagaaggcagtacttcttactcaaggaactctaagtgctcacggatgatgtgagccaacagacagtgcctgcactttgaagaaggagggtttgtgatatcttgacgtcaaagatctgactgaaatctttggaatcaagcccatcttttctgatttctagcctattttccttccaatggcactgtcctaaggttgtacagcttagaaaatgttaacccagtattgttttctttacttgcatgtgagagaagagaagtcaaagtcaaaagcaggcagctggaaacctccaggggaagggattcccagggatcctttatattcctttctccccaagcaaagcagagagagaagcagcacacataccctgtggattctgggtttggaaagcatagttgtgttgttcatctgggctgctataacaaaatactatacactgaatggctcataaaccacagaaatgtatttctcacagttctggtggcttggaagtccaaaatcaaggtgccagcagattttgtgtctggtgagagcctgttacctggttcatagatggctgtcttcacatggcagaagggacaaaggacctctctgggatctcttttaaaagggtgctaatcccatacatgagggctacatctcatcgcctcccaaaagtctcacctccaaataccatcatgaggagaattaggtttcaacatataaatctggggaggacagacattcagtctattgcaggggccaacaacagcccctcatcaagaggtggcgctacggaggacaatatagctggccctccatatccacaggttctgtatatacagactcaaccaactgagggtgaaaaacactaaaaaaataataataatacacaataaaaataaaaataatacagtgtaacacatatttacatagcatttacattgtattagatattataagtaatctaaagatgatttaaactatgggaggatgtgcataggttacatacaagtactacatcattttatattagggacttaagcatcccccagattttggtatcctggagtcctggaagcaatttctccccaccccccacaactagggatgaaggatgactgtactaatgattctgtttctttgcaattctccttagtacctccaaagctctagcaagatcatcacacaggaaacaacatcattttcttagcccactcacagcacagagaacaatgaagtaatggctgtagacaaatccaagtgtctgttgcaacctcagggtgaggagagaaaattggtagtggtgttgcttcctttagagcttaaaagg

SEQ ID NO: 3851 - DNA, 801 bp, Homo sapiens
agatgtttatagaaggcagtacttcttactcaaggaactctaagtgctcacggatgatgtgagccaacagacagtgcctgcactttgaagaaggagggtttgtgatatcttgacgtcaaagatctgactgaaatctttggaatcaagcccatcttttctgatttctagcctattttccttccaatggcactgtcctaaggttgtacagcttagaaaatgttaacccagtattgttttctttacttgcatgtgagagaagagaagtcaaagtcaaaagcaggcagctggaaacctccaggggaagggattcccaggggtcctttatattcctttctccccaagcaaagcagagagagaagcagcacacataccctgtggattctgggtttggaaagcatagctgtgttgttcatctgggctgctataacaaaatactatacactgaatggctcataaaccacagaaatgtatttctcacagttctggtggcttggaagtccaaaatcaaggtgccagcagattttgtgtctggtgagagcctgttacctggttcatagatggctgtcttcacatggcagaagggacaaaggacctctctgggatctcttttaaaagggtgctaatcccatacatgagggctacatctcatcgcctcccaaaagtctcacctccaaataccatcatgaggagaattaggtttcaacatataaatctggggaggacagacattcagtctattgcaggggccaacaacagcccctcatcaagaggtggcgctacggaggacaatatagctggccc

SEQ ID NO: 3852 - DNA, 828 bp, Homo sapiens
aaagaaacagaatcattagtacagtcatccttcatccctagttgtggggggtggggagaaattgcttccaggactccaggataccaaaatctgggggatgcttaagtccctaatataaaatgatgtagtacttgtatgtaacctatgcacatcctcccatagtttaaatcatctttagattacttataatatctaatacaatgtaaatgctatgtaaatatgtgttacactgtattatttttatttttattgtgtattattattatttttttagtgtttttcaccctcagttggttgagtctgtatatacagaacctgtggatatggagggccagctatattgtcctccgtagcgccacctcttgatgaggggctgttgttggcccctgcaatagactgaatgtctgtcctccccagatttatatgttgaaacctaattctccacatgatggtatttggaggtgagacttttgggaggcgatgagatgtagccctcatgtatgggattagcacccttttaaaagagatcccagagaggtcctttgtcccttctgccatgtgaagacagccatctatgaaccaggtaacaggctctcaccagacacaaaatctgctggcaccttgattttggacttccaagccaccagaactgtgagaaatacatttctgtggtttatgagccattcagtgtatagtattttgttatagcagcccagatgaacaacacagctatgctttccaaacccagaatccacagggtatgtgtgctgcttctctctctgctttgcttggggagaaaggaatataaaggaaccctgggaatccctt

SEQ ID NO: 3853 - DNA, 19 bp, Homo sapiens
ggcgctacggaggacaata

SEQ ID NO: 3854 - DNA, 21 bp, Homo sapiens
tcttgctagagctttggaggt

SEQ ID NO: 3855 - DNA, 393 bp, Homo sapiens
ggcgctacggaggacaatatagctggccctccatatccacaggttctgtatatacagactcaaccaactgagggtgaaaaacactaaaaaaataataataatacacaataaaaataaaaataatacagtgtaacacatatttacatagcatttacattgtattagatattataagtaatctaaagatgatttaaactatgggaggatgtgcataggttacatacaagtactacatcattttatattagggacttaagcatcccccagattttggtatcctggagtcctggaagcaatttctccccaccccccacaactagggatgaaggatgactgtactaatgattctgtttctttgcaattctccttagtacctccaaagctctagcaaga

SEQ ID NO: 3856 - DNA, 828 bp, Homo sapiens
ttcctgtgtgatgatcttgctagagctttggaggtactaaggagaattgcaaagaaacagaatcattagtacagtcatccttcatccctagttgtggggggtggggagaaattgcttccaggactccaggataccaaaatctgggggatgcttaagtccctaatataaaatgatgtagtacttgtatgtaacctatgcacatcctcccatagtttaaatcatctttagattacttataatatctaatacaatgtaaatgctatgtaaatatgtgttacactgtattatttttatttttattgtgtattattattatttttttagtgtttttcaccctcagttggttgagtctgtatatacagaacctgtggatatggagggccagctatattgtcctccgtagcgccacctcttgatgaggggctgttgttggcccctgcaatagactgaatgtctgtcctccccagatttatatgttgaaacctaattctccacatgatggtatttggaggtgagacttttgggaggcgatgagatgtagccctcatgtatgggattagcacccttttaaaagagatcccagagaggtcctttgtcccttctgccatgtgaagacagccatctatgaaccaggtaacaggctctcaccagacacaaaatctgctggcaccttgattttggacttccaagccaccagaactgtgagaaatacatttctgtggtttatgagccattcagtgtatagtattttgttatagcagcccagatgaacaacacagctatgctttccaaacccagaatccacagggtatgtgtgctgcttctctc

SEQ ID NO: 3857 - DNA, 20 bp, Homo sapiens
atgcctgctgagacttgctt

SEQ ID NO: 3858 - DNA, 23 bp, Homo sapiens
ggtaagacaatttccttctcagc

SEQ ID NO: 3859 - DNA, 188 bp, Homo sapiens
atgcctgctgagacttgctttatcaccctcctatttcagcgttaataaaatgatgctgtcattccagctgggaggtattttgatttttccagacagagagctggctgatcacattgtgagtgtgtgtgtgtgtgcatacttgtgtgcatgtgcctcccttctggggctgagaaggaaattgtcttacc

SEQ ID NO: 3860 - DNA, 20 bp, Homo sapiens
tcattccagctgggaggtat

SEQ ID NO: 3861 - DNA, 22 bp, Homo sapiens
tgatgcctttattgagggattt

SEQ ID NO: 3862 - DNA, 250 bp, Homo sapiens
tcattccagctgggaggtattttgatttttccagacagagagctggctgatcacattgtgagtgtgtgtgtgtgtgcatacttgtgtgcatgtgcctcccttctggggctgagaaggaaattgtcttaccttaataatagataaatgtattttgatggtagctgattactaagttgagactttctgtaaaatcttctagcatcatggtaatttactaacagacaaagaaaatccctcaataaaggcatca

SEQ ID NO: 3863 - DNA, 2001 bp, Homo sapiens
aataaaaataatacagtgtaacacatatttacatagcatttacattgtattagatattataagtaatctaaagatgatttaaactatgggaggatgtgcataggttacatacaagtactacatcattttatattagggacttaagcatcccccagattttggtatcctggagtcctggaagcaatttctccccaccccccacaactagggatgaaggatgactgtactaatgattctgtttctttgcaattctccttagtacctccaaagctctagcaagatcatcacacaggaaacaacatcattttcttagcccactcacagcacagagaacaatgaagtaatggctgtagacaaatccaagtgtctgttgcaacctcagggtgaggagagaaaattggtagtggtgttgcttcctttagagcttaaaaggcacagctgaggtgactacccttcactccatttttgctagcatataataagctctgctttgcatttttgctcccatggcatcatttttgaaatatgaatcataaaagcagtgcatttctgctatgcctgctgagacttgctttatcaccctcctatttcagcgttaataaaatgatgctgtcattccagctgggaggtattttgatttttccagacagagagctggctgatcacattgtgagtgtgtgtgtgtgtgcatacttgtgtgcatgtgcctcccttctggggctgagaaggaaattgtcttaccttaataatagataaatgtattttgatggtagctgattactaagttgagactttctgtaaaatcttctagcatcatggtaatttactaacagacaaagaaaatccctcaataaaggcatcattagcaaaaatcctgtgccactagcttctaaatagatgcgtaaaggtagggtagtagagaccaggagtaaaataagaaggttggagtaaatgacctctaagggccacttttatttaaagaaaattccaagcataacatcggaagacctagagatgatgctaaatgcctgaaaagggagaatataaatttaggaaggtagtaaaaattttctcaatgataaaggaacttatgactatgggtatttgcacgtgtatgtgtctgctgtgtctttaatattgaggggaattctttttcttaaatctgagaatgatggcttagttgatggcaaaatggaaaggatgcggggaccagccaggagcccaggagcaaggcaggcgtttccagaagatcttggcagaaagaggcagaccaaagaagcagactggccagccagtgccaggtagggtgtgagattaactacaggtgggtggagcacagcccacgcactacagaggtctgggcagtcatgaaatccaaaggggctgctcaggatagtgggtagcagggactgcaccttcgagggtgaggttcagaggcaggatttgggtttcttttttttttttaaaggattagcaagagaaagcgcacaatctagaacaaatgagatatcaacaagagtcactgaaaagggacctacggacaggctgttagggacttgatcttcaggaataagactggctactagaatcaaagaaaaggtttgtgtaggtccagtagcaaggctgatttgatgctatcatgctgagaaactcatactctgcttttcatttttgcgtttttagtacctctaaagctttttacattctccccaactatagagatactctagggcctaagttgatcctagccgggctaatcaccaaatcacagaatttggcagatgatttcaagaagtttaaaatgagtcccgtcctcaaagtgtttataatctatttgagaagaaaaggtcagcacacatgagacagaaatatgtctactgtgtccatttactgtgttatgtacaagtcataggtattaagaaaaataaaaattagtaagtgctggagaggtcaaggaaggcttcaccgaagagggatgatttgagggtttaaattttttct

SEQ ID NO: 3864 - DNA, 2001 bp, Homo sapiens
aaaataatacagtgtaacacatatttacatagcatttacattgtattagatattataagtaatctaaagatgatttaaactatgggaggatgtgcataggttacatacaagtactacatcattttatattagggacttaagcatcccccagattttggtatcctggagtcctggaagcaatttctccccaccccccacaactagggatgaaggatgactgtactaatgattctgtttctttgcaattctccttagtacctccaaagctctagcaagatcatcacacaggaaacaacatcattttcttagcccactcacagcacagagaacaatgaagtaatggctgtagacaaatccaagtgtctgttgcaacctcagggtgaggagagaaaattggtagtggtgttgcttcctttagagcttaaaaggcacagctgaggtgactacccttcactccatttttgctagcatataataagctctgctttgcatttttgctcccatggcatcatttttgaaatatgaatcataaaagcagtgcatttctgctatgcctgctgagacttgctttatcaccctcctatttcagcgttaataaaatgatgctgtcattccagctgggaggtattttgatttttccagacagagagctggctgatcacattgtgagtgtgtgtgtgtgtgcatacttgtgtgcatgtgcctcccttctggggctgagaaggaaattgtcttaccttaataatagataaatgtattttgatggtagctgattactaagttgagactttctgtaaaatcttctagcatcatggtaatttactaacagacaaagaaaatccctcaataaaggcatcattagcaaaaatcctgtgccactagcttctaaatagatgcgtaaaggtagggtagtagagaccaggagtaaaataagaaggttggagtaaatgacctctaagggccacttttatttaaagaaaattccaagcataacattggaagacctagagatgatgctaaatgcctgaaaagggagaatataaatttaggaaggtagtaaaaattttctcaatgataaaggaacttatgactatgggtatttgcacgtgtatgtgtctgctgtgtctttaatattgaggggaattctttttcttaaatctgagaatgatggcttagttgatggcaaaatggaaaggatgcggggaccagccaggagcccaggagcaaggcaggcgtttccagaagatcttggcagaaagaggcagaccaaagaagcagactggccagccagtgccaggtagggtgtgagattaactacaggtgggtggagcacagcccacgcactacagaggtctgggcagtcatgaaatccaaaggggctgctcaggatagtgggtagcagggactgcaccttcgagggtgaggttcagaggcaggatttgggtttcttttttttttttaaaggattagcaagagaaagcgcacaatctagaacaaatgagatatcaacaagagtcactgaaaagggacctacggacaggctgttagggacttgatcttcaggaataagactggctactagaatcaaagaaaaggtttgtgtaggtccagtagcaaggctgatttgatgctatcatgctgagaaactcatactctgcttttcatttttgcgtttttagtacctctaaagctttttacattctccccaactatagagatactctagggcctaagttgatcctagccgggctaatcaccaaatcacagaatttggcagatgatttcaagaagtttaaaatgagtcccgtcctcaaagtgtttataatctatttgagaagaaaaggtcagcacacatgagacagaaatatgtctactgtgtccatttactgtgttatgtacaagtcataggtattaagaaaaataaaaattagtaagtgctggagaggtcaaggaaggcttcaccgaagagggatgatttgagggtttaaattttttctgaga

SEQ ID NO: 3865 - DNA, 2001 bp, Homo sapiens
tttacatagcatttacattgtattagatattataagtaatctaaagatgatttaaactatgggaggatgtgcataggttacatacaagtactacatcattttatattagggacttaagcatcccccagattttggtatcctggagtcctggaagcaatttctccccaccccccacaactagggatgaaggatgactgtactaatgattctgtttctttgcaattctccttagtacctccaaagctctagcaagatcatcacacaggaaacaacatcattttcttagcccactcacagcacagagaacaatgaagtaatggctgtagacaaatccaagtgtctgttgcaacctcagggtgaggagagaaaattggtagtggtgttgcttcctttagagcttaaaaggcacagctgaggtgactacccttcactccatttttgctagcatataataagctctgctttgcatttttgctcccatggcatcatttttgaaatatgaatcataaaagcagtgcatttctgctatgcctgctgagacttgctttatcaccctcctatttcagcgttaataaaatgatgctgtcattccagctgggaggtattttgatttttccagacagagagctggctgatcacattgtgagtgtgtgtgtgtgtgcatacttgtgtgcatgtgcctcccttctggggctgagaaggaaattgtcttaccttaataatagataaatgtattttgatggtagctgattactaagttgagactttctgtaaaatcttctagcatcatggtaatttactaacagacaaagaaaatccctcaataaaggcatcattagcaaaaatcctgtgccactagcttctaaatagatgcgtaaaggtagggtagtagagaccaggagtaaaataagaaggttggagtaaatgacctctaagggccacttttatttaaagaaaattccaagcataacattggaagacctagagatgatgctaaatgcctgaaaagggagaatataaatttaggaaggtagtaaaaattttctcaatgataaaggaacttatgactatgggtatttgcacgtgtatgtgtctgctgtgtctttaatattgaggggaattctttttcttaaatctgagaatgatggcttagttgatggcaaaatggaaaggatgcggggaccagccaggagcccaggagcaaggcaggcgtttccagaagatcttggcagaaagaggcagaccaaagaagcagactggccagccagtgccaggtagggtgtgagattaactacaggtgggtggagcacagcccacgcactacagaggtctgggcagtcatgaaatccaaaggggctgctcaggatagtgggtagcagggactgcaccttcgagggtgaggttcagaggcaggatttgggtttcttttttttttttaaaggattagcaagagaaagcgcacaatctagaacaaatgagatatcaacaagagtcactgaaaagggacctacggacaggctgttagggacttgatcttcaggaataagactggctactagaatcaaagaaaaggtttgtgtaggtccagtagcaaggctgatttgatgctatcatgctgagaaactcatactctgcttttcatttttgcgtttttagtacctctaaagctttttacattctccccaactatagagatactctagggcctaagttgatcctagccgggctaatcaccaaatcacagaatttggcagatgatttcaagaagtttaaaatgagtcccgtcctcaaagtgtttataatctatttgagaagaaaaggtcagcacacatgagacagaaatatgtctactgtgtccatttactgtgttatgtacaagtcataggtattaagaaaaataaaaattagtaagtgctggagaggtcaaggaaggcttcaccgaagagggatgatttgagggtttaaattttttctgagacagggtttcactccatcgcccaa

SEQ ID NO: 3866 - DNA, 20 bp, Homo sapiens
tgtgtttcaatggctctgga

SEQ ID NO: 3867 - DNA, 21 bp, Homo sapiens
cctgggatctgacattaacca

SEQ ID NO: 3868 - DNA, 245 bp, Homo sapiens
tgtgtttcaatggctctggacaccatcgctgatagaataggtcacctgtttagcgtagtcaggatgaatgttgccatcaagatgactgctctatattgaagagtctgagtcaactcagcatatccaactatcttcgtgacttttttttttaaaagagttttaatgtattcctttagtactggcagttgcttttcccagtctgctgctgctgaagaaattcctaatggttaatgtcagatcccagg

SEQ ID NO: 3869 - DNA, 801 bp, Homo sapiens
gcctgaagtgcattttttgagcagaaagaataggtcaaattgcagcaagctatctggggaatcacacacatcagttatatctgtgcagtagcactaaaagaccatggctggtggagataataatagtttttgtgattataagttattgccttgctttcctccctggaaaatactgggtttcaccaaagtttgaatctgagttttcctatgacagtgtgcctgcttgtgtgaatatcatccattttgagtatctccaaaagacatcagtggagaatgtggctcatcgtgcagccttcctgatagatctgactatggtagtgcacatactacatttaagccctgctgtgtatcaaagctgggtactcaaccctaacacatacccttcacttataatgaaactcctaatggactcttgcttatagggaaagcttgtataaccaactctcaatttttatgtgtatgtaaggtcaaaactgcagtgttctgttaatggtgataccactacaatgtctgtagatataggcaatagaaaactgaagcactcttatgacacaaatacagtgtaaacattcttgaaaaactgggaatttgctgcagcatcactcctagccactccccagaaatttggaggttggacaacctagtgtgatagtagaaacacttgaaatgtttgggagtcatttttacacaaacttgtgctgttgcttttttttaaggttaaaaaaggcatgttttgatgcaagaacacaggatatgagttcgcactaaataaagatctacatctacacaataggtttcaat

SEQ ID NO: 3870 - DNA, 20 bp, Homo sapiens
agctgagcaaactgcaatgg

SEQ ID NO: 3871 - DNA, 19 bp, Homo sapiens
aaaccaccaccacaaccaa

SEQ ID NO: 3872 - DNA, 619 bp, Homo sapiens
cccaacttagagtgttaaagctattggcatctagtgggtagaggctagagatgctgttgctgttaaacatcctacaatgcccagcctttatccctgcagtaaagaattattcaccccaaaatgttaacagggctgaggttaacgaagccctaatctatactgacactaaaatgttaagcactttggtagaaattgttatctgatgcagctgagcaaactgcaatggggttctacagaagggaaaaaaagagggttactataaccagatatccccatgtcctcagattctgggagacagttttgttgttgttgttgttgtggttgtggtggtggtttttgagacggagtctcgctctgttgctcaggctggagtgcagtggtgcgatttcggctcactgcaacctctgcctcccgtgttcaagcaattctcctgtctccgcctcccgagtagctggaattacaggcatatgccactacgcccggctaatttttgtatttttagtagagatggggtttcaccatgttggccaggctggtctcaaactcctgacctcaggcgatcccgcccacctcggcctcccatagtgctgagatgacaggcatgagcctctgcacccaa

SEQ ID NO: 3873 - DNA, 801 bp, Homo sapiens
gttttttaatttctcaagtcttcctcagcaaaggaaatttcctgctgcccttgaacttgtgtaggatttagctggcccatggagtggccagagttctctaccctcttatatctcaatcttcttttttagatccttaggctatctctctgagcagccagctaaaaccccacaaattcctatttctttctcatacaaactaatttagccttctttgtttcgctctcttcttgctcggccctgggtggagtgggagtgggattactgaaataggaacatcaaagcatttttctaacaaacaacagcaatcagaaaaacaacttatatcccaggagataaattatgccactcttctagaaggcaaaatgtaagtacttgttttacatataatttattttcttcccaagacactggggagaaacaatgtagtgtagctgttgtgagcagtgggcactggagttagaccacttggggtttgagtcttggttccatcacctgttatccccatgaccatgggcaagttacttgacctatctgttgccccttagttccctcactattacaatggggaaaatagaagtacctaccttagagaactattgtgagaatttttaaaaggcaatgatgtgaagtgccttcattcagtggctgacacatggtggctgctcgacagtgagtactaaagagtgggatgtgtaagcagactgcccacatagagaaagagcatgcaatgagcacattccaacacacaggggtgagtgtattaagctacagggttcaaagaagacaaagagcttcctctct

SEQ ID NO: 3874 - DNA, 641 bp, Homo sapiens
caagtacaaacagacctctgctatagcactgtcacattgcattatagttatttgtttacttttctgtctttcccaggagcctgggatttttttttaagagaggaagctctttgtcttctttgaaccctgtagcttaatacactcacccctgtgtgttggaatgtgctcattgcatgctctttctctatgtgggcagtctgcttacacatcccactctttagtactcactgtcgagcagccaccatgtgtcagccactgaatgaaggcacttcacatcattgccttttaaaaattctcacaatagttctctaaggtaggtacttctattttccccattgtaatagtgagggaactaaggggcaacagataggtcaagtaacttgcccatggtcatggggataacaggtgatggaaccaagactcaaaccccaagtggtctaactccagtgcccactgctcacaacagctacactacattgtttctccccagtgtcttgggaagaaaataaattatatgtaaaacaagtacttacattttgccttctagaagagtggcataatttatctcctgggatataagttgtttttctgattgctgttgtttgttagaaaaatgctttgatgttcctatttcagtaatc

SEQ ID NO: 3875 - DNA, 2001 bp, Homo sapiens
cttatatctcaatcttcttttttagatccttaggctatctctctgagcagccagctaaaaccccacaaattcctatttctttctcatacaaactaatttagccttctttgtttcgctctcttcttgctcggccctgggtggagtgggagtgggattactgaaataggaacatcaaagcatttttctaacaaacaacagcaatcagaaaaacaacttatatcccaggagataaattatgccactcttctagaaggcaaaatgtaagtacttgttttacatataatttattttcttcccaagacactggggagaaacaatgtagtgtagctgttgtgagcagtgggcactggagttagaccacttggggtttgagtcttggttccatcacctgttatccccatgaccatgggcaagttacttgacctatctgttgccccttagttccctcactattacaatggggaaaatagaagtacctaccttagagaactattgtgagaatttttaaaaggcaatgatgtgaagtgccttcattcagtggctgacacatggtggctgctcgacagtgagtactaaagagtgggatgtgtaagcagactgcccacatagagaaagagcatgcaatgagcacattccaacacacaggggtgagtgtattaagctacagggttcaaagaagacaaagagcttcctctcttaaaaaaaaatcccaggctcctgggaaagacagaaaagtaaacaaataactataatgcaatgtgacagtgctatagcagaggtctgtttgtacttgtcaaaagatttctactcagcagtgaccatgacatcctgttgttgtggcgttagtttctatcccactagagagtcacaatgcatattgcattctccttgcagtgaaaggtagttaagtagagtgtttccgagtgtttggatttggccagtcccactgccaaaatccacagcttaaggaacagagatgtgtctctgtttgtctttgctgctgggctcccgtatcctgtatagtcttaaagggggcttcattccccatggtgggcttcttcttgattaagactctggggcttgccgggtaaggtggctcacgcctgtaatcccagcactttgggaggccgacacgggcagatcgcttgaggccaggagttcgagaccagcctggctaacgtggcgaaaccctgcctctactaaaaatacaaaaattagccaggcatggtgatgcatgcctgtaattccagctactcgggaggctgagccaggagaatctcttgaacctgggaggtggaggttgcagtgagctgagactgcgccactgccttccagcctcggtgaaagagcaagactgcctccagcaacaacaaaagactctggggctcagcagagtcttagaatgcaaccaaggacaaactacctcccccaatcctataggacctgagtaagcacgtttccaaaaagcaatgattattaaaatgcaacaagcattattctttgtgtgatttcaagacctttttaccctatcctttccccaacctctaaaatatatcatggcctacagtaacttacagaaactcggtgagtaactgttttgctaattaaagtcgatgaatacttagatttttaaaacaactgtagagaatgttggcaaaaccttgagtgtcacaaagcaagaagcagccatcatcatggaacagtgtaaaatgaaagtcaatcaaatgagaaaaatatcaaagttgaatttattccttacacctgacctggataaagtccaagtagatattaatatttaaattcataaaatgatatcatcatggtattagaagaaactaaaagagagttattcaccttaaagtggagaaggcatttctaatgatgacattaaatccagaattatacaagaaaagattaatacattcaatctttcaacatcaaaattttctgcatagaaaaagccataaacatagccaaaaaatgacaaattgcaaaaatatg

SEQ ID NO: 3876 - DNA, 2001 bp, Homo sapiens
tctaacaaacaacagcaatcagaaaaacaacttatatcccaggagataaattatgccactcttctagaaggcaaaatgtaagtacttgttttacatataatttattttcttcccaagacactggggagaaacaatgtagtgtagctgttgtgagcagtgggcactggagttagaccacttggggtttgagtcttggttccatcacctgttatccccatgaccatgggcaagttacttgacctatctgttgccccttagttccctcactattacaatggggaaaatagaagtacctaccttagagaactattgtgagaatttttaaaaggcaatgatgtgaagtgccttcattcagtggctgacacatggtggctgctcgacagtgagtactaaagagtgggatgtgtaagcagactgcccacatagagaaagagcatgcaatgagcacattccaacacacaggggtgagtgtattaagctacagggttcaaagaagacaaagagcttcctctcttaaaaaaaaatcccaggctcctgggaaagacagaaaagtaaacaaataactataatgcaatgtgacagtgctatagcagaggtctgtttgtacttgtcaaaagatttctactcagcagtgaccatgacatcctgttgttgtggcgttagtttctatcccactagagagtcacaatgcatattgcattctccttgcagtgaaaggtagttaagtagagtgtttccgagtgtttggatttggccagtcccactgccaaaatccacagcttaaggaacagagatgtgtctctgtttgtctttgctggtgggctcccgtatcctgtatagtcttaaagggggcttcattccccatggtgggcttcttcttgattaagactctggggcttgccgggtaaggtggctcacgcctgtaatcccagcactttgggaggccgacacgggcagatcgcttgaggccaggagttcgagaccagcctggctaacgtggcgaaaccctgcctctactaaaaatacaaaaattagccaggcatggtgatgcatgcctgtaattccagctactcgggaggctgagccaggagaatctcttgaacctgggaggtggaggttgcagtgagctgagactgcgccactgccttccagcctcggtgaaagagcaagactgcctccagcaacaacaaaagactctggggctcagcagagtcttagaatgcaaccaaggacaaactacctcccccaatcctataggacctgagtaagcacgtttccaaaaagcaatgattattaaaatgcaacaagcattattctttgtgtgatttcaagacctttttaccctatcctttccccaacctctaaaatatatcatggcctacagtaacttacagaaactcggtgagtaactgttttgctaattaaagtcgatgaatacttagatttttaaaacaactgtagagaatgttggcaaaaccttgagtgtcacaaagcaagaagcagccatcatcatggaacagtgtaaaatgaaagtcaatcaaatgagaaaaatatcaaagttgaatttattccttacacctgacctggataaagtccaagtagatattaatatttaaattcataaaatgatatcatcatggtattagaagaaactaaaagagagttattcaccttaaagtggagaaggcatttctaatgatgacattaaatccagaattatacaagaaaagattaatacattcaatctttcaacatcaaaattttctgcatagaaaaagccataaacatagccaaaaaatgacaaattgcaaaaatatgcctagctctattatagaccaaagaccaacttccctaacatataatgagcttctacaaataagaaagcaaagacctacaatgcaatagaaaaatggacaaagacaccaacagtgactagataaagaaaatgtgctatgtatacaccatggaatactacacagccacgaaaaagaatgaaatcat

SEQ ID NO: 3877 - DNA, 598 bp, Homo sapiens
gtttctgcattagttggcagctgtatccatgttgcttaaaaggacatgatttcattctttttcgtggctgtgtagtattccatggtgtatacatagcacattttctttatctagtcactgttggtgtctttgtccatttttctattgcattgtaggtctttgctttcttatttgtagaagctcattatatgttagggaagttggtctttggtctataatagagctaggcatatttttgcaatttgtcattttttggctatgtttatggctttttctatgcagaaaattttgatgttgaaagattgaatgtattaatcttttcttgtataattctggatttaatgtcatcattagaaatgccttctccactttaaggtgaataactctcttttagtttcttctaataccatgatgatatcattttatgaatttaaatattaatatctacttggactttatccaggtcaggtgtaaggaataaattcaactttgatatttttctcatttgattgactttcattttacactgttccatgatgatggctgcttcttgctttgtgacactcaaggttttgccaacattctctacagttgtttt

SEQ ID NO: 3878 - DNA, 2001 bp, Homo sapiens
taaaaaaagaaaagaaaaatgggcagagaatatgaacaggcaagacctgaggaaaaaaagtacacatgactcctaggcacatgcaagtggctcagcctcactcacaatagagaaattcaaattaaagctacatggagacatcgtttttcaattatcaaattaccaaagatccaaaaatctgacaacatgctttgttgatgacggtgttctgaaacaggcattcaacatctattcttcctctctgattcctgacacagtccagttttatgtaggcatttatccctcccagcatatcccctaagcctcagttcacatttgggactgactgatctaagggtaattccattcccctgggcagtaattggttcaggaacccaggctagaatgagtcagtgtatggcagtgccctgaggacagggattaactcaagaatagggatgtaaccaaaagtatgttggaagttcctgggagggaaatttccttgctcttaggtgaacttctaattgatggcatcgctatgtgaaacctgtaatggctatagccattttgcctccatgagagaagccacccaaggccaaagccaacacacataggtcatcacagggcattgcagagagagagatccagagccacgaaattcagctgctcctgaagcctgcttgcctcctggacttccagttgtatgaagtgatcattttccttattgtcgatgtgagtttgtatagaattttctgttacttgaaactgcaggctagtagccatgtagcacagagaatgtttccaagaatctaagtgaaacacatgggtaagtcagaaggaaaaaatgtctctgaagtttctcagacttagcaaactgccaaagcacatggcatgtgttgatataaaaactttccaaatcaggctctgaactccaattagaatatagtacagaagcagagggaggaagggctggagagaccaggacaaaagttatcacacatttacactggttgtgattgggcagtgggcctattaacaaagctttctctctctttcctatattttctcagataaaaataccatgaatgtgttacttttaggatgaaaaactaaatacaaaagaccaattggatgtaaaatggtggagaggctggcccaagcaaactctcaataagttgtcaggttttcaaaatacaagtccaaaggaagagtggatagataaataaatacatgctcataaaacctctgcataaattagagattaggaaatttaagaattcctagtaaactcgaggctattaggactgagggatttaaaacaaaacccaaaaagcaaatttagaatacagttgtcatgtttaaagcagagctcatttttctgttcttcagaccatgatttttcacaatatttttgaggtgtcatatttctaatcacccctcataaggaatttgttttcatttcctagtcattccacaggctgagggtcactacataattcaggttgggaggctgtctcatcatcttctggatcaaaaagaatcctgaagtggatgatgggatttttcccccttatttattttctgacaatcctgagaagtagagggaagatgaggattccataaaggagactcaagtctagggtaattagagaggaggaaaccaggaagaaggagcagtgacctggaagcaaagagattaaataagccggggactgaaaaatgcctgctggatatggcaactaggaaatcattgatgatgtgggcagaagcagggatgacagcgaaggtcaaggcaggtgaaagacactgtttcactcttaagaaagttggctgtgagggagaggaggaagtagccctgaggataagagtgcctgtttctgggctggaggaaagtgccagcagaaaggaaaagctggtggtacctgagggaccaaggttaacaaacccagtagggtttaggtggtggggtggagagcacaggtgaagccattttcttaggcagaacaacaccttaaaaggaaa

SEQ ID NO: 3879 - DNA, 559 bp, Homo sapiens
cacaggggtgagagaccttacttttgattgtatatcttttctcttaatgaattttacattatgcacatgttatccttttttttttttcttttgagacacagtctcaccctgtcacccaggctggagtgcagtgtcagacccctcaatctccgcctcctgggttcaagccattcttgtgcctcagcctctcgagtagctggggttacaggcaggcaccaccacacccagctaattttagtagaatcagggtttcaccatgttggccagcctggtctcaaactcctgacctcaaatgatctggccaccttggcctcccaaagtactgggattacaggcctgagccactgctcgtggcccgtgttaccaatttttaaaaagtaataacctggtggagaaagccgattcctatcttgtacccaagacttgctaaattgaaatctctcacatggagcctggagacgtgcatttttaacaagcttctttattcttctgcaaactggtattgagaagcactgtccttggcctttcctttttaaacacttctttcctctttttttcc

SEQ ID NO: 3880 - DNA, 20 bp, Homo sapiens
caattcctgctgccattttc

SEQ ID NO: 3881 - DNA, 20 bp, Homo sapiens
aaggatcatgtgagcccaag

SEQ ID NO: 3882 - DNA, 258 bp, Homo sapiens
caattcctgctgccattttctcacatgttctgctagggacattcagtacacagataatcacataaaatacattcttttctcttatgacaagtgctgttatatacttttttccacatatatatatatatatatatatatatatttttttttttttttttttttttttgagacaggatctcactttgtcacccaggcttgggtgcagtggcatgatctcagctcactgcagtctggacctcttgggctcacatgatcctt

SEQ ID NO: 3883 - DNA, 20 bp, Homo sapiens
aactggaggaacagggaggt

SEQ ID NO: 3884 - DNA, 20 bp, Homo sapiens
ttgacagcacatgggaacat

SEQ ID NO: 3885 - DNA, 264 bp, Homo sapiens
aactggaggaacagggaggttttactttgtgtcctgatctttactgatttgagagattttatactgatatgtatcaccctcctatgatgtatatacaaaacatattatttgtacataattagaaaatacttatgtatattaacagccactgaatcctggtgacagtaggtgaggcaaaacaaaacaaaaacccagctaaaaatcaaaaaccccaaacagacaaaaaaaaaaactaataagaaatatgttcccatgtgctgtcaa

SEQ ID NO: 3886 - DNA, 20 bp, Homo sapiens
actggaggaacagggaggtt

SEQ ID NO: 3887 - DNA, 20 bp, Homo sapiens
aggaatccgagcagaattga

SEQ ID NO: 3888 - DNA, 429 bp, Homo sapiens
actggaggaacagggaggttttactttgtgtcctgatctttactgatttgagagattttatactgatatgtatcaccctcctatgatgtatatacaaaacatattatttgtacataattagaaaatacttatgtatattaacagccactgaatcctggtgacagtaggtgaggcaaaacaaaacaaaaacccagctaaaaatcaaaaaccccaaacagacaaaaaaaaaaactaataagaaatatgttcccatgtgctgtcaaggtttccataaagaaagcagtgaaaaatctccaagggaaagatctttttatgatgtcattggaatgttatttttgtcattagaaaaaagctccagccatcaaaatgaaatgcaatgagtctgcaaccttgaattccccaggactcttcaattctgctcggattcct

SEQ ID NO: 3889 - DNA, 2001 bp, Homo sapiens
ccagctaattttttgtatttttttttttttggtagggatgtggtttcaccatgttgtccaggctggtcttgaactcctgagctcaagcgatctgcctgcctcagcctcccagagtgctaggattacaggcgtgagccacggcacccagccacttcaccatatattttaaagatcaatccttattagttcattaaaagatacttcagtattctattggctgcttggaattctatcttttaatatcaaaagatagaaaacaatagatgtttatactaattctttatttcagagatacccaacactgagggagtttttcagtaccctatgtataaagcaccataacttagattatatgtttgtttctttgtttttggagatattgtctcattatgttgcctcggctggtctcaccttcctgggctcaagtgatcatgccgtctcaacctcccaagtagctggaatatcagcgtgcaccatggcacctggctctaggattatgtttttttttttttttttttttgagatggagtcttgctctgtcacccaggctggagtgcagtggcacgatctcggctcactgcaagctccgcctcctgggttcatgccattctcctgcctcagtctcccgagtagctgggactacaggcatgtgccactatgcccagctaattttttgtatttttaatagagatggggtttcaccgtgttagccaggatagtctcaatctcctgacctcgtgatccgcccgtcttggcctcccaaagtgctgggattacaggcgtgagccaccgcacctggctgggattctgtgtttaatagaagattttgacttggggtcattcatggactatatacacattgagaaacacttgtcataggacctaaaaatataatgagtttacaggaaggaaatgttgagagaaacggagcaagaaaactggaggaacagggaggttttactttgtgtcctgatctttactgatttgagagattttataccgatatgtatcaccctcctatgatgtatatacaaaacatattatttgtacataattagaaaatacttatgtatattaacagccactgaatcctggtgacagtaggtgaggcaaaacaaaacaaaaacccagctaaaaatcaaaaaccccaaacagacaaaaaaaaaaactaataagaaatatgttcccatgtgctgtcaaggtttccataaagaaagcagtgaaaaatctccaagggaaagatctttttatgatgtcattggaatgttatttttgtcattagaaaaaagctccagccatcaaaatgaaatgcaatgagtctgcaaccttgaattccccaggactcttcaattctgctcggattccttgactaggggctaggactaatttagaaagtagcagaaggtggattaaaacacagattcatctgattccagcccccaggccctttccattatgaacaccaccttctcaccaaggaatgttcctggtgttccttgccagaggagccagacatctggcctccaaaggtgacaactctcacttctacttagctacagggaggcgctctggatgacactggtagctactaatacagggggtgaactcttcagagaatcatccagccacatcagttggcctagtaggtcctgttggaattatgctaccccagctgaaatagaaagataaacaaggctgggagcactggctcacgcctataatcccaccaccttgagaggctgaggcaggcagatcacttgaggtcaggagtttgaggccaccctggccaacatggtgaaaccccgtctccaccaaaaaatacaaaaattagctgggcgtagtggtgctctcctgtagtcccagctactcaggagtctgagacgtgagaatcatttgaacccaggaggcggaggttgcagagttgagatcgcgccactgcactccagcctaggtgacggagtgagaacctgtctcaaaaaaaaaaaaaaaaagataaacaag

SEQ ID NO: 3890 - DNA, 2001 bp, Homo sapiens
tcccagagtgctaggattacaggcgtgagccacggcacccagccacttcaccatatattttaaagatcaatccttattagttcattaaaagatacttcagtattctattggctgcttggaattctatcttttaatatcaaaagatagaaaacaatagatgtttatactaattctttatttcagagatacccaacactgagggagtttttcagtaccctatgtataaagcaccataacttagattatatgtttgtttctttgtttttggagatattgtctcattatgttgcctcggctggtctcaccttcctgggctcaagtgatcatgccgtctcaacctcccaagtagctggaatatcagcgtgcaccatggcacctggctctaggattatgtttttttttttttttttttttgagatggagtcttgctctgtcacccaggctggagtgcagtggcacgatctcggctcactgcaagctccgcctcctgggttcatgccattctcctgcctcagtctcccgagtagctgggactacaggcatgtgccactatgcccagctaattttttgtatttttaatagagatggggtttcaccgtgttagccaggatagtctcaatctcctgacctcgtgatccgcccgtcttggcctcccaaagtgctgggattacaggcgtgagccaccgcacctggctgggattctgtgtttaatagaagattttgacttggggtcattcatggactatatacacattgagaaacacttgtcataggacctaaaaatataatgagtttacaggaaggaaatgttgagagaaacggagcaagaaaactggaggaacagggaggttttactttgtgtcctgatctttactgatttgagagattttatactgatatgtatcaccctcctatgatgtatatacaaaacatattatttgtacataattagaaaatacttatgtatattaacagccactgaatcctggtgacagtaggtaaggcaaaacaaaacaaaaacccagctaaaaatcaaaaaccccaaacagacaaaaaaaaaaactaataagaaatatgttcccatgtgctgtcaaggtttccataaagaaagcagtgaaaaatctccaagggaaagatctttttatgatgtcattggaatgttatttttgtcattagaaaaaagctccagccatcaaaatgaaatgcaatgagtctgcaaccttgaattccccaggactcttcaattctgctcggattccttgactaggggctaggactaatttagaaagtagcagaaggtggattaaaacacagattcatctgattccagcccccaggccctttccattatgaacaccaccttctcaccaaggaatgttcctggtgttccttgccagaggagccagacatctggcctccaaaggtgacaactctcacttctacttagctacagggaggcgctctggatgacactggtagctactaatacagggggtgaactcttcagagaatcatccagccacatcagttggcctagtaggtcctgttggaattatgctaccccagctgaaatagaaagataaacaaggctgggagcactggctcacgcctataatcccaccaccttgagaggctgaggcaggcagatcacttgaggtcaggagtttgaggccaccctggccaacatggtgaaaccccgtctccaccaaaaaatacaaaaattagctgggcgtagtggtgctctcctgtagtcccagctactcaggagtctgagacgtgagaatcatttgaacccaggaggcggaggttgcagagttgagatcgcgccactgcactccagcctaggtgacggagtgagaacctgtctcaaaaaaaaaaaaaaaaagataaacaagctctttcatatgatatagtgaagcacattagacatcagactgacatagaagaatcttttaatgtcaaaagatgaaaaacaattcatgtgtatattatttttaattt

SEQ ID NO: 3891 - DNA, 21 bp, Homo sapiens
ggcctagtaggtcctgttgga

SEQ ID NO: 3892 - DNA, 24 bp, Homo sapiens
cagtctgatgtctaatgtgcttca

SEQ ID NO: 3893 - DNA, 978 bp, Homo sapiens
  misc_feature 499: n = A,T,C or G
tccttgccagaggagccagacatctggcctccaaaggtgacaactctcacttctacttagctacagggaggcgctctggatgacactggtagctactaatacagggggtgaactcttcagagaatcatccagccacatcagttggcctagtaggtcctgttggaattatgctaccccagctgaaatagaaagataaacaaggctgggagcactggctcacgcctataatcccaccaccttgagaggctgaggcaggcagatcacttgaggtcaggagtttgaggccaccctggccaacatggtgaaaccccgtctccaccaaaaaatacaaaaattagctgggcgtagtggtgctctcctgtagtcccagctactcaggagtctgagacgtgagaatcatttgaacccaggaggcggaggttgcagagttgagatcgcgccactgcactccagcctaggtgacggagtgagaacctgtctcaaaaaaaaaaaaaaaaangataaacaagctctttcatatgatatagtgaagcacattagacatcagactgacatagaagaatcttttaatgtcaaaagatgaaaaacaattcatgtgtatattatttttaatttagggattcacaatatctggggagtttcgcagtatcttgcatgctttccctttcctttcattgccctgctcccaaagtgtggtaagtttaagaaaagtgaattggttttttgagacatgacagaagacactctcaggatgacacaaaaccataacaagaattactaaagtagttggtgtcactaaaaacatattttaaattactcatatggagttgacatttaaaaaaaggagattgggttgagatttccaagaagaatcatctcctagttagtaagaaagtcttttattttcacttgtttagcttcatatccagatgatggtattttataattatattatgtgagatttgggaagtttccatt

SEQ ID NO: 3894 - DNA, 1001 bp, Homo sapiens
tcctgctcaacccttcccttacgttgccagatcaaccgttctggagaatcccctcatcaagtcgtacccagcagtctgctattaccaccaatttctcctcttctaaaccattctaccttccactaacaaattaatctccctaatccacttttcttaaaagcctttaattcccttcaggactaaagggatactccttagccgggcaaagaccccagcaacctgaatcactattttctccaacttaactgccgctactccccagcatgaaccctttttattggtgaatatcagtataactatttatgtttatcagcccactcatttattaatttctgcctctgtgcttttactgacaccatttgccttacttagaaaacattacccctccacctgcctgctaaaatccactacgtctactccaaacccattcttctattttttgaacagcctagagcactcacatgttccactcatttagcgtttaattatgtgctacttcaaatccctccatctaaactgtacattccttgagggcaaggcacttctcagcatgttccacagggcctagcagagaaagctgttagcatcaattaacactcagttcatatacattgattaaacaaagcacagaaaccaatggctttccaattagagattttaatctgttttttctttttttcttttcttttttttttttttgagatggagtcttgctcttgttgcccaggctggagtgcaatggcgcaatctcgactcactgcaacctccacttcccgggttcaagcgattctcctgcctcagcctcctgaatagctgggattacaggcacgcgccaccacgcccagctaatttttgtatttttagtagagacagggtttcaccatgttgactaggctggtcttgaacttctgacctcaggtgatccacccgcctcggcctcccaaagtgctaggattataggcgtgagctaccgtgcccggcctaatctgtttcatcattca

SEQ ID NO: 3895 - DNA, 2001 bp, Homo sapiens
ttggtttcacgaagacaaagaagaggcgcaggactgggggaagacatggatacttactgcgtctggatcattggcaggacatgtgggccataatgtctaaaacagataattgccacacaaaaatggatcagagctgcagtttgcatgactctgctccaaggtgggcttgggtggggttattagatttcgtacattcagctttgtccttttcaggcaggagacagcatctgctgtcgagtactctcagtccccaggaggcctatgagctagtcagaaaatataattttaataggattagctgagagatgagcaaatgtcaaatggtgatttggtagtatgtcatggctgctaactttgacatgctaagtgtaacattattaatggcttctatgcatggctaagagggttaacacttagcaaaattagttccctggatttttgtcctgctgttatattttatgggcatgatggagtgtgctaccttgagtaaaccatttaacctctctctgccttagcttctagtttataaaataggaagcttgttgtggcaggcagtattcacaaacattttgagagctacagagagcgctgtaggattgtctttctccccgccccctcattcccccccatccaccccgtcccaatgactgagtcagtcatttggaaaggtcagctttttcactggatactctcaattgctactccctaagtcagttaattagtatttttctaaaatgctcctaccagtccagagctgaaagatgtagtctctaactgctgtttctactctctgggcctgccaatcctgctaaccccttttcacccaatggctattgccatgtgactcacacctcaggttctgggatcaatcccagtcattttggagggcaactagagctttatattaacactctgggacttcaacataaggcaaccatgctcagtgtgaagtttggtcctagttctaggtattaggctcctgctttgtttgtaagtctcactctgtccccccagatccagcctttgaatatttgttttgtcctgctgggtcctcaaacttgggcctccagtgagtatctcagtagctcaaggatctgagttctatttgttttcatcaattccctgtagaaacgaaagggcagacctagaaaaccccagcactgaagctggggccttgctataagcaacacactttctcaaggcttgccgtgatttcccaatttttgcccactcctggattttccaaggctatgtgttccagctgtccattggcttacaacacccacattctctgtttaacaggcctgatgccggctgccttcctggcctgctgccggttccatatcctccagatactgcattctggctgaacgtttatcacgccagctgggttggcctccgattccacggatgtatctggttctagtttccatttctccccatccacctcaccctcattacagttaatccttttatattaaaccatagcggatctttgctgttgtggaaactgatgtggtattggaattttatccttgtttacatctttctttgtgttggaaaggttgggattacttccaaaaccttcccagagagctttcctgtctcctttaggggaaacaaatgaaaacttgacaatagctggtatctatgacaccagcttcaaggccactattttaattgtaaaattgcattatttaatcataattttgcttttagatatacaaatatattttaaagtatattttgtccagtgtttactcacagctctcaatttcaaggtatcttactggaactcagtggctttgtggttataaggacataaacaaatcaaggctagggatggtgtggtgttctacagtggtaagctacattagaatcctccggaggacttgttaaaacagattgctgggtaccaccccacagagtgtctatagaatgatgccctaagaatttgcactttgacgaaaactggtcatgtatttaagctggtcacagata

SEQ ID NO: 3896 - DNA, 2001 bp, Homo sapiens
caaaaatggatcagagctgcagtttgcatgactctgctccaaggtgggcttgggtggggttattagatttcgtacattcagctttgtccttttcaggcaggagacagcatctgctgtcgagtactctcagtccccaggaggcctatgagctagtcagaaaatataattttaataggattagctgagagatgagcaaatgtcaaatggtgatttggtagtatgtcatggctgctaactttgacatgctaagtgtaacattattaatggcttctatgcatggctaagagggttaacacttagcaaaattagttccctggatttttgtcctgctgttatattttatgggcatgatggagtgtgctaccttgagtaaaccatttaacctctctctgccttagcttctagtttataaaataggaagcttgttgtggcaggcagtattcacaaacattttgagagctacagagagcgctgtaggattgtctttctccccgccccctcattcccccccatccaccccgtcccaatgactgagtcagtcatttggaaaggtcagctttttcactggatactctcaattgctactccctaagtcagttaattagtatttttctaaaatgctcctaccagtccagagctgaaagatgtagtctctaactgctgtttctactctctgggcctgccaatcctgctaaccccttttcacccaatggctattgccatgtgactcacacctcaggttctgggatcaatcccagtcattttggagggcaactagagctttatattaacactctgggacttcaacataaggcaaccatgctcagtgtgaagtttggtcctagttctaggtattaggctcctgctttgtttgtaagtctcactctgtccccccagatccagcctttgaatatttgttttgtcctgctgggtcctcaaacttgggcctccagtgagtatctcagtagctcaaggatctgagttctatttgttttcatcaattccctgtagaaacgaaagggcagacctagaaaaccccagcactgaagctggggccttgctataagcaacacactttctcaaggcttgccgtgatttcccaatttttgcccactcctggattttccaaggctatgtgttccagctgtccattggcttacaacacccacattctctgtttaacaggcctgatgccggctgccttcctggcctgctgccggttccatatcctccagatactgcattctggctgaacgtttatcacgccagctgggttggcctccgattccacggatgtatctggttctagtttccatttctccccatccacctcaccctcattacagttaatccttttatattaaaccatagcggatctttgctgttgtggaaactgatgtggtattggaattttatccttgtttacatctttctttgtgttggaaaggttgggattacttccaaaaccttcccagagagctttcctgtctcctttaggggaaacaaatgaaaacttgacaatagctggtatctatgacaccagcttcaaggccactattttaattgtaaaattgcattatttaatcataattttgcttttagatatacaaatatattttaaagtatattttgtccagtgtttactcacagctctcaatttcaaggtatcttactggaactcagtggctttgtggttataaggacataaacaaatcaaggctagggatggtgtggtgttctacagtggtaagctacattagaatcctccggaggacttgttaaaacagattgctgggtaccaccccacagagtgtctatagaatgatgccctaagaatttgcactttgacgaaaactggtcatgtatttaagctggtcacagataaccagaaggtgctgaactgttcttaatcaattcaaacttttacctgaaatggataataaggtggagagccttgagaaatgaacttccaaagttcagtgcatgcagttagcatgactg

SEQ ID NO: 3897 - DNA, 2001 bp, Homo sapiens
ttaattgtaaaattgcattatttaatcataattttgcttttagatatacaaatatattttaaagtatattttgtccagtgtttactcacagctctcaatttcaaggtatcttactggaactcagtggctttgtggttataaggacataaacaaatcaaggctagggatggtgtggtgttctacagtggtaagctacattagaatcctccggaggacttgttaaaacagattgctgggtaccaccccacagagtgtctatagaatgatgccctaagaatttgcactttgacgaaaactggtcatgtatttaagctggtcacagataaccagaaggtgctgaactgttcttaatcaattcaaacttttacctgaaatggataataaggtggagagccttgagaaatgaacttccaaagttcagtgcatgcagttagcatgactgctggttttagagttctcaaccacttattgcttatgagcaataagtggccataagcatttggccaatcacttacttgagtttacaggttttctcatccataaaataacaatagctgctatgctgccctcaaagggttgtcctgaggtctgaatggaatgggtgtgatagtgtctgagcaactataaagtggtatggcactgggaggtattgtaacggtttttcattactcttcttaaaatatcaccagtttcctttggctcttgtttccctcattaattatagcaactgtaatctgggaatacacagtacttttattgccataaaagccaaacttcaataaactcaaatttcaaacttttctataaaattttattcagtgagatcagacacgccttataaacattacacagagccaagaatgattccgtttttacagctataaaaagagatctacaagaccctattgtaatttggggtggcgtcacggttaatctttttcaaccctgtttagattggcccattaataaaaatggctgctagttacagcacatttaaaaacacaatcaccgcgtacaaatggtaacctgtccactccatacttccatgtcctgtgccgcttctattaacttgtctttggaagtagtaaattctcccagtctggacgtggctattttttctcacacacgggccaacacagttcttgctcaacttgggtgcgtttatgacttttcaacagtgtcatcagccgtacctaactcttccaggccttcagtatctcaggtgttagcttcagttgttcctaggtctttcacaaatatcataaatgacaggcaggacgcttttctggagtcaagatctgttagtttcggagtcagaaagaccccgtttagagactcgtaggcgaacttgccagggggcctaccaggggcagaatggggtcctccggaccagccagccgcgtctcagccacctccgcagcccccggggccctgaaccccggccgcgttgacgcgcgcttctcccggacgtcggcaggaggcgcccgcggcggaccaggcgcggcgcgcaccgtagccggcccagggggcggagggagcggagaggaggagctggagggggcgcggcttcctctcggtcgctccctggcgccgggcctctttctctgcctggcccagggctggcggccggcgggggtcgcggcggcggcagtgggggcgctggcgggccgcgggtggcgggggccgggccgcggctccgggtgttaggagacaagatggcggcggctctcagaaggccggtctcctcctctccgccgtcctccgccccgccgctcgccgcctcctcctctcgggtctcctcctcctcgtttgctgcctcctcctcctcctgcagcagcaccagcgaccgccgaagcgccggctcgctcacccggagctccggaggtggatagacggggcagctgcaggctccggcgaccgaggccgagctggggccggggcggggacggcggcggcggcggcggcgacggcggcggcgccgggtggggatggggtcgcaga

SEQ ID NO: 3898 - DNA, 18 bp, Homo sapiens
aggccggtctcctcctct

SEQ ID NO: 3899 - DNA, 20 bp, Homo sapiens
cagcagaaagagccacaggt

SEQ ID NO: 3900 - DNA, 384 bp, Homo sapiens
aggccggtctcctcctctccgccgtcctccgccccgccgctcgccgcctcctcctctcgggtctcctcctcctcgtttgctgcctcctcctcctcctgcagcagcaccagcgaccgccgaagcgccggctcgctcacccggagctccggaggtggatagacggggcagctgcaggctccggcgaccgaggccgagctggggccggggcggggacggcggcggcggcggcggcgacggcggcggcgccgggtggggatggggtcgcagacgctgcagatcctccgacagggggtgtgggccgcgctcagcgggggctggtactacgacccgcaccaggccaccttcgtgaacgcgctgcacctctacctgtggctctttctgctg

SEQ ID NO: 3901 - DNA, 20 bp, Homo sapiens
agctccggaggtggatagac

SEQ ID NO: 3902 - DNA, 20 bp, Homo sapiens
cagcagaaagagccacaggt

SEQ ID NO: 3903 - DNA, 243 bp, Homo sapiens
agctccggaggtggatagacggggcagctgcaggctccggcgaccgaggccgagctggggccggggcggggacggcggcggcggcggcggcgacggcggcggcgccgggtggggatggggtcgcagacgctgcagatcctccgacagggggtgtgggccgcgctcagcgggggctggtactacgacccgcaccaggccaccttcgtgaacgcgctgcacctctacctgtggctctttctgctg

SEQ ID NO: 3904 - DNA, 20 bp, Homo sapiens
acatgcggttagcatgactg

SEQ ID NO: 3905 - DNA, 20 bp, Homo sapiens
agaatggtgacgaaccaagg

SEQ ID NO: 3906 - DNA, 365 bp, Homo sapiens
acatgcggttagcatgactgctggttttagagttctcagccacttattgcttatgagcaataggggctgtatcttcaaaacctaactagacgacgactcctccctcctcctcctcctcctcctcctcctcctccccctcctcctcctcctcctcctcctcctcctccccctcctcctccccctcctcctcctccccctcctcctcctccccctccccctcctccccctcctcctcctcctcctcctcctcctcctcctcctcctcctcctcctcctcgtcctcctcctcctcctcctcctctcaccagcaccatcatcatcacggccatcaggccatcatcattcccttggttcgtcaccattct

SEQ ID NO: 3907 - DNA, 20 bp, Homo sapiens
acatgcggttagcatgactg

SEQ ID NO: 3908 - DNA, 20 bp, Homo sapiens
agaatggtgacgaaccaagg

SEQ ID NO: 3909 - DNA, 365 bp, Homo sapiens; identical to SEQ ID NO: 3906

SEQ ID NO: 3910 - DNA, 23 bp, Homo sapiens
aaacctaactagacgacgactcc

SEQ ID NO: 3911 - DNA, 20 bp, Homo sapiens
gatgatgatggtgctggtga

SEQ ID NO: 3912 - DNA, 244 bp, Homo sapiens
aaacctaactagacgacgactcctccctcctcctcctcctcctcctcctcctcctccccctcctcctcctcctcctcctcctcctcctccccctcctcctccccctcctcctcctccccctcctcctcctccccctccccctcctccccctcctcctcctcctcctcctcctcctcctcctcctcctcctcctcctcctcgtcctcctcctcctcctcctcctctcaccagcaccatcatcatc

SEQ ID NO: 3913 - DNA, 2001 bp, Homo sapiens
aagaagtatgttcctgcttcagcgcctttgtgcttgcttttccctctgtctggatgactcctcttttccagatacctgtgtggctgctccactttttgcaggttctcatatacgtgaggctttctctgatagcctatgtgaaatagcaacttccccagctctcacaagactccatagcccaccttttaaaatagtatggtatttattcctaactgatatctatttatttgtttttatgtctttcttatcttattagaatataagctctgagagggcaggaacttagtttcgttcactgctgtatttttaggacctagattagtgtaaagcacatgtagtactccgatgaatgattgagaagtgcacaagacacagcttctgctttcaaggaacttaaaatctagcctgggggtaatgagttgttactgttagaactgctaggaaagggtaagtaaagagggaccctgatcttatagtcaggggatgaaccctagaccaggggtggtcaggacagagaatttgtaaacattttaggaaacatactagtaaaaggtagatagtttgaagtatacaccaaaaataaagcaaaatccaacattttgtgttaaaatctcagacagccataggttattatttgcatgctcttacaataataactgtaagtgataatgactgttttaaaagtacatgtataggttctttaaccccgtgacctcatgaggttttgctgttagtaggcaagttgtgagctgggatttacacagagctttctgaaggcaaagtcactgtacaggctgccttttatttattcccccccaaaaagtgcctaaatctgtggagagatcgtacattaagttaggaaacagtcttaggactttataggattcaaacacttttggtgtttatttaggagcatttgtggatactttgaaaggtggactctatatacatcaactagttaaaaatcttttaagtagtgaaaatgaagaaaaaatttttgcttcttaattctgattgtcctgtctgtttcctttaaggtactcattcttttttatctagttacagtgatttttgtacatgtcacagatgatgagatttttgggggtgagtggcatttttgtatggtggaaagcagattggaattagtgtcttgatttttgaatcttggctttgttattgattgtgtgtcctgtgggcaagactccacctttctgaaccttgatttactcatttgtgagatatttcatgggtgtttttcaagaaaatatttatgaaatagaagaaattatttaccttcagaatggccttcagtaaatgtcatttgaaaaaatggctaattggaagtgtttcctctataatgctgtatgactgtaggagactaaatagctctggattattaagtcaaatcattttcataacatattgctcaatatattgttttcctctgtaaagcaatatatccctaggtgatgaaatagaacattaaaatttatggctgggcgcggtggctcacgcactttgggaggccgaggcaggcagatcatcacgaggtcaggagatccagaccatcctggctaacacggtgaaaccccgtctctactaaaaaaacaaaaaattagccgggcatggtggcgggcgcctgtagtcccagctactcgggaggctgaggcaggagactgttgtgaacctgggaggcagagcttgcagtgagccaagattgtgccactgcactccagcctgggcgacagagcgagactctgtctcaaaaaaaaaaagaaaaaagaaaaaaaagaacgttaaaatttattacgtaagtggttcccagactcctccagttgacatcagaatcacttgacaatgttaatgatgtgcaagccctttcttattcggtagatctggagtgtggcctattgatttgtattttataaacattctaggtaagtttaaataacttgatcaatattcctaactaccagcccctgactgacatccagctgctac

SEQ ID NO: 3914 - DNA, 2001 bp, Homo sapiens
tgtctggatgactcctcttttccagatacctgtgtggctgctccactttttgcaggttctcatatacgtgaggctttctctgatagcctatgtgaaatagcaacttccccagctctcacaagactccatagcccaccttttaaaatagtatggtatttattcctaactgatatctatttatttgtttttatgtctttcttatcttattagaatataagctctgagagggcaggaacttagtttcgttcactgctgtatttttaggacctagattagtgtaaagcacatgtagtactccgatgaatgattgagaagtgcacaagacacagcttctgctttcaaggaacttaaaatctagcctgggggtaatgagttgttactgttagaactgctaggaaagggtaagtaaagagggaccctgatcttatagtcaggggatgaaccctagaccaggggtggtcaggacagagaatttgtaaacattttaggaaacatactagtaaaaggtagatagtttgaagtatacaccaaaaataaagcaaaatccaacattttgtgttaaaatctcagacagccataggttattatttgcatgctcttacaataataactgtaagtgataatgactgttttaaaagtacatgtataggttctttaaccccgtgacctcatgaggttttgctgttagtaggcaagttgtgagctgggatttacacagagctttctgaaggcaaagtcactgtacaggctgccttttatttattcccccccaaaaagtgcctaaatctgtggagagatcgtacattaagttaggaaacagtcttaggactttataggattcaaacacttttggtgtttatttaggagcatttgtggatactttgaaaggtggactctatatacatcaactagttaaaaatcttttaagtagtgaaaatgaagaaaaaatttttgtttcttaattctgattgtcctgtctgtttcctttaaggtactcattcttttttatctagttacagtgatttttgtacatgtcacagatgatgagatttttgggggtgagtggcatttttgtatggtggaaagcagattggaattagtgtcttgatttttgaatcttggctttgttattgattgtgtgtcctgtgggcaagactccacctttctgaaccttgatttactcatttgtgagatatttcatgggtgtttttcaagaaaatatttatgaaatagaagaaattatttaccttcagaatggccttcagtaaatgtcatttgaaaaaatggctaattggaagtgtttcctctataatgctgtatgactgtaggagactaaatagctctggattattaagtcaaatcattttcataacatattgctcaatatattgttttcctctgtaaagcaatatatccctaggtgatgaaatagaacattaaaatttatggctgggcgcggtggctcacgcactttgggaggccgaggcaggcagatcatcacgaggtcaggagatccagaccatcctggctaacacggtgaaaccccgtctctactaaaaaaacaaaaaattagccgggcatggtggcgggcgcctgtagtcccagctactcgggaggctgaggcaggagactgttgtgaacctgggaggcagagcttgcagtgagccaagattgtgccactgcactccagcctgggcgacagagcgagactctgtctcaaaaaaaaaaagaaaaaagaaaaaaaagaacgttaaaatttattacgtaagtggttcccagactcctccagttgacatcagaatcacttgacaatgttaatgatgtgcaagccctttcttattcggtagatctggagtgtggcctattgatttgtattttataaacattctaggtaagtttaaataacttgatcaatattcctaactaccagcccctgactgacatccagctgctactcaacgtacctcttggctgtctcacaggcatcccaaaagtatcatg

SEQ ID NO: 3915 - DNA, 2001 bp, Homo sapiens
catagcccaccttttaaaatagtatggtatttattcctaactgatatctatttatttgtttttatgtctttcttatcttattagaatataagctctgagagggcaggaacttagtttcgttcactgctgtatttttaggacctagattagtgtaaagcacatgtagtactccgatgaatgattgagaagtgcacaagacacagcttctgctttcaaggaacttaaaatctagcctgggggtaatgagttgttactgttagaactgctaggaaagggtaagtaaagagggaccctgatcttatagtcaggggatgaaccctagaccaggggtggtcaggacagagaatttgtaaacattttaggaaacatactagtaaaaggtagatagtttgaagtatacaccaaaaataaagcaaaatccaacattttgtgttaaaatctcagacagccataggttattatttgcatgctcttacaataataactgtaagtgataatgactgttttaaaagtacatgtataggttctttaaccccgtgacctcatgaggttttgctgttagtaggcaagttgtgagctgggatttacacagagctttctgaaggcaaagtcactgtacaggctgccttttatttattcccccccaaaaagtgcctaaatctgtggagagatcgtacattaagttaggaaacagtcttaggactttataggattcaaacacttttggtgtttatttaggagcatttgtggatactttgaaaggtggactctatatacatcaactagttaaaaatcttttaagtagtgaaaatgaagaaaaaatttttgtttcttaattctgattgtcctgtctgtttcctttaaggtactcattcttttttatctagttacagtgatttttgtacatgtcacagatgatgagatttttgggggtgagtggcatttttgtatggtggaaagcagattggaattagtgtcttgatttttgaatcttggctttcttattgattgtgtgtcctgtgggcaagactccacctttctgaaccttgatttactcatttgtgagatatttcatgggtgtttttcaagaaaatatttatgaaatagaagaaattatttaccttcagaatggccttcagtaaatgtcatttgaaaaaatggctaattggaagtgtttcctctataatgctgtatgactgtaggagactaaatagctctggattattaagtcaaatcattttcataacatattgctcaatatattgttttcctctgtaaagcaatatatccctaggtgatgaaatagaacattaaaatttatggctgggcgcggtggctcacgcactttgggaggccgaggcaggcagatcatcacgaggtcaggagatccagaccatcctggctaacacggtgaaaccccgtctctactaaaaaaacaaaaaattagccgggcatggtggcgggcgcctgtagtcccagctactcgggaggctgaggcaggagactgttgtgaacctgggaggcagagcttgcagtgagccaagattgtgccactgcactccagcctgggcgacagagcgagactctgtctcaaaaaaaaaaagaaaaaagaaaaaaaagaacgttaaaatttattacgtaagtggttcccagactcctccagttgacatcagaatcacttgacaatgttaatgatgtgcaagccctttcttattcggtagatctggagtgtggcctattgatttgtattttataaacattctaggtaagtttaaataacttgatcaatattcctaactaccagcccctgactgacatccagctgctactcaacgtacctcttggctgtctcacaggcatcccaaaagtatcatgcccaaaagcttctgaattcccccctaaacaacactgccacaaaatgtttttcctcactctgtcatgttagttaatggcactgtctgtatctagttgcttatcccccaccccttgcttttgagcaaa

SEQ ID NO: 3916 - DNA, 20 bp, Homo sapiens
cgatcatcctccacttccat

SEQ ID NO: 3917 - DNA, 26 bp, Homo sapiens
catgtatgtatgtataaccacacagc

SEQ ID NO: 3918 - DNA, 401 bp, Homo sapiens
taagtgtttttcaagggtcattttgtatttgatttttcagtaattttatatttgatttttgtcttgtagagactgacaccgaacctaacccctaagtaagcagctccaccatatgatacagcctaccacaatcctccctccacctccaactattctacatcagttaacaagtctaaaagagcttcacatgtataataaaarattcattcaacaaatacttcttcagatcctaatatgagccaggcagtcatgcagacacttgataaacactgatgagtaaatcagacctggcccctgccctcatggaacttacaaggtatggaagtggaggatgatcgagaggacaaacaagtaaacaaacaaaagatatatgtttgtgttaagtgctatggaagaaagtt

SEQ ID NO: 3919 - DNA, 22 bp, Homo sapiens
aagtcattgaaagtgcagtacg

SEQ ID NO: 3920 - DNA, 26 bp, Homo sapiens
aaacaatgaagacaactaggaagaaa

SEQ ID NO: 3921 - DNA, 183 bp, Homo sapiens
aagtcattgaaagtgcagtacgtatggctttttgtgcatacagctgtgtggttatacatacatacatgatatatacagtaatatataccacataaatctgtggagagattatattcagactctaaatcattaacaaaatttataaaggtttcaacattttcttcctagttgtcttcattgttt

SEQ ID NO: 3922 - DNA, 2001 bp, Homo sapiens
tatatacagtaatatataccacataaatctgtggagagattatattcagactctaaatcattaacaaaatttataaaggtttcaacattttcttcctagttgtcttcattgttttctgtaactgatctttgtcatctttagaatgatatatcttttattagtgaggattacgctaaagctctcaggtcattttctttcccccaatttaaaagtatttaaagatcattttaaacaagatttagttagggtgactaaaacagggattttcatattttaaaatttatatttctctaaaagtttagatcaagctagaaaagttactgtgctataaattagcaatttatattgctattgcatattgtacatatgatttttaagtattattttctgcatcctttaggggaaggttaatgactagtggatggcctgtttagatctattagcctgtgccctttaccagtattttcaatatttaggatcaaagtgagtctaattatttccataactggtcatggcacagatataactcttatgtattatattacctataataaattaagggtacactgtccaaagatggtttacacagaaaaccatctaccacatgttctcacttataagtgggagttaaacatttggatacccacagatacaaagaagggaacaataaatactggggattccaaaagcgggtagggggcgagggttgaaaagctatacattggctactgtgttcactacttgggtgacaggatcattagaagccaaacctcagcatcacttaatatgcctatgtgacaaacctgcacatgtaccttgctgaatctaaaggaaaagaaaattagacctccaagaaagcagccatatttgtcaatttgtagaaaagtgtattaatttacaaaaaaagcagttgatttataaaatgttctgtcttttgtgacgtaaaggtggagtgttttctcccacttgaaaattactccaaatcataaaatcatttggtaattggaaaactaggaaagtttctattttttttctagcctttgaatacacagattcagtcaggtaatttgctttctctagctgactttactgagagttaaatctttcaacattttattaaagaattttcaaacatataggaaagttgagaaaattgtacccaccacctggattctgtgtttttaaatattgtgtctctatctgttttattcctctatctgtccacccttttttagggagatgcatgtaaattaagttacacttctatacaaatcacccctaaactcttcagcaggtgcattgtcaggtaggttctaaaggcacaatcttcagtgaaccattcgatgagttttgataaatgcacacgtttgcgtagtgtagacttggcatgttgtagaatatcagcgtcactccagatagtttctgcttgaccttctgagtcagtcctctcatccttgttctgactttttttcattataaattaggttatcctgttctagaatttcatataaatggaatcatgtagcacatgctttgtgtaagccaccttcactcagcataacgtggttgagattaatccatggtgttgtatcagtagcttttttcctttttattgctgagtaatattcctttgtatgactgtgctacagtttgctcacctttatccattcccgtgtagatgagcagctaggctcttcccagtttttggctactatatgtaaagatgccaacatgaggataggttttatcagaactcaaagacactggaaaactttacggaatctcaaaacccttttctctttccaaataagaccatgttttaatttaaaaatctttttgttcagctgttctgatttatttgtctaaatcagaaattatagataagtaaaaagaaaatacagccattggtaattccatcacccctgtctgtagaacattttagtaaccaaaatatatttggagttttaaatactactttgattacaaaaatgggctcataga

SEQ ID NO: 3923 - DNA, 20 bp, Homo sapiens
tggcaggtgagttgagacac

SEQ ID NO: 3924 - DNA, 21 bp, Homo sapiens
cagagaaaccagaggaaccag

SEQ ID NO: 3925 - DNA, 215 bp, Homo sapiens
tggcaggtgagttgagacacctgagagtaataacactagaatagcacagactaataatatggagaagagaagattacaacaaacgttctatagagttgattgctgttgacttctttagcatatagatgaactttactaaatccatatagatgaactttactaaatactatagatgaaataagtagctactgattctggttcctctggtttctctg

SEQ ID NO: 3926 - DNA, 24 bp, Homo sapiens
ttgattgctgttgacttctttagc

SEQ ID NO: 3927 - DNA, 20 bp, Homo sapiens
cagggttctatttggctcgt

SEQ ID NO: 3928 - DNA, 375 bp, Homo sapiens
ttgattgctgttgacttctttagcatatagatgaactttactaaatccatatagatgaactttactaaatactatagatgaaataagtagctactgattctggttcctctggtttctctgctccccccccccccccccccccaccaaataggagatgctttatttggtagaattgtaaaacagttcagagttcttcttttatccctggaacctgagcagttgcatcttttataacttgcactgtcagtgctagttgctttgtgttacaagaaagaaaagaaaacttagggaaaaggaagtcatttcctttgaggttttaagggggaaaaaaaagttgcattctgtagagctttgaacgagccaaatagaaccctg

SEQ ID NO: 3929 - DNA, 2001 bp, Homo sapiens
tggctctctgtataatgctgtttttactaatttataaattgaggctatgagacaagtacacagccatattataaggtagaatatgactaatgccttgtgtgtcataaagtgctcaggaattggaaggaggatgtaattatttcctagaatgctttatgcagaggatattcatacattcagaaccttcactgtgtgctgggtgctgtggtaggccttatggtgggacctttatgaggttatttgtgctggaatagtgtttccataatcttcccactgggcaaattaatctttgttctggggaaaagattgttccttaaaagaatgtatgttcttggatgtagtgttttgctctgcttaagtattctaatttatctaacacattaagggtttctcagtgagttattttttagcttctgagaatattatttataacattcttggtatgtatctggaatggttaaaagaaatgatataaaaacaaacaattcagaaaacctaaataaaccaatttcattttcactcagcagtatttatgccacaaatatacattacacgtaatttccacaagcctcacagaccctcatgaccctcatgacaaaactgaaatgaacttggatggggaataaagaggaattttgggttgtttttggcattttactaatgaaatcctcaatttcatatgtatttgatttatatatcaagcagtcctcccatctgagtctcctgagtagctaggactacaggtgtgaaccaacatgccaggctaatttttgaatttttgtagagataagatctgcctatgttgcccaggctggtaaagatattttcaaagtgagaataaagatagctaatcttaacaaaaatatgctttgttaccaaaaatcttactttactcccttaatgtcacagtattgaatattgaagaataccaggatgtgttattgaaaaatatacttaaaatactttaaatatacttgaagtgatcttttttcaatttctgaatatgaagattttcaaatgtataagaaaattgaaagaatgcttcatctagattccactattatgaacctttttgaaaaatcacatttgtttcaactatataaagatgcatggtatttatctgtacatactctgtctctcttacacacatatctgactcaattgacagtatgttgcaaacattatgacacatcaccccctaaatgcttcaggcaatatttttaatttgtctattggtacatttggagggggagttgtttttcaaaatatatgtcgggataggtgattctgatggccattccaagttaacagtcactgtgctgggaggtctgttatttgtgaatgcctgaaaacatcttattatttcctacttaggttttagtttaactcatctccctttttcagcactgaagaaattgctgagtaactgattctggcaataatgtacacttttatggtatggataatagtacaacttatatagtgctttttacccagtatggtgtatttatggagcatttcacccttaagttaaaaatcctttgttaagtttttgtcatgaaaataatactagttgtagaaattattccagacagtagttaagtatatatagaaaacatgaatttttaaaaaatctttaataggtattagacaaaaacatgaatttttttcttgcaaacctttaataggtattagatgaaaacatgaatttttttacaaacctttaataggggagaattttatagcatggagaaaaccggtaaatgtgaatactatatattttaaggttatataataaaaataggggaaatgttataaataaaataaaaagtcttctgttctctatcatccacgctaccagttcacatgcctcagagataatggttgtttcctcttggtagtgtatatatacaaacatatattcatatatgtatgtacttgaaatagccaatgggattatatttgtgttgcaggatccactgaagtgcatgtaactcttct

SEQ ID NO: 3930 - DNA, 24 bp, Homo sapiens
ccagtatggtgtatttatggagca

SEQ ID NO: 3931 - DNA, 20 bp, Homo sapiens
tgaactggtagcgtggatga

SEQ ID NO: 3932 - DNA, 372 bp, Homo sapiens
ccagtatggtgtatttatggagcatttcacccttaagttaaaaatcctttgttaagtttttgtcatgaaaataatactagttgtagaaattattccagacagtagttaagtatatatagaaaacatgaatttttaaaaaatctttaataggtattagacaaaaacatgaatttttttcttgcaaacctttaataggtattagatgaaaacatgaatttttttacaaacctttaataggggagaattttatagcatggagaaaaccggtaaatgtgaatactatatattttaaggttatataataaaaataggggaaatgttataaataaaataaaaagtcttctgttctctatcatccacgctaccagttca

SEQ ID NO: 3933 - DNA, 22 bp, Homo sapiens
tttgggttctggtaatgctctt

SEQ ID NO: 3934 - DNA, 20 bp, Homo sapiens
ccgcaagctgaattctaaca

SEQ ID NO: 3935 - DNA, 430 bp, Homo sapiens
tttgggttctggtaatgctcttatgagagctaatatactttttacagtttatatatcttattgattttcattctctctcttttatttatttatttatttatttatttttttctgggaggcagtgtctcactctcttgcccaggctggagtgcagtggtgcgatcttggctcactgcaacctctgcctcccaggttcaagcgattctcctgcctcaggctccctagtaattgagattacaggcgtgcaccaccaagtctcgctaatttttatatttttagtagagacagtttcaccatgttggccagactggtctcaaactcatgacctcaagtgatcctcccaccttggcctcccaaagtgctggcattacaggtgtgagccactgcgccaggcctgattttcattcttgtgttagaattcagcttgcgg

SEQ ID NO: 3936 - DNA, 23 bp, Homo sapiens
attcagcttgcggtttcttctac

SEQ ID NO: 3937 - DNA, 25 bp, Homo sapiens
tttacctatcctgtttctcccattt

SEQ ID NO: 3938 - DNA, 401 bp, Homo sapiens
ttaacatacctcacaaaatgccagttcaggatacatttaatgggattaccttatgagcaaatacattaaaaacaatgagattctccttgctcctatataaaagtataactatattcttatagacgtagtataataagcaagcacaaaataataacagtaactcaaatttaaagcttttaagaatcaaaataattcaataaygaaagtattaggtcaaaggaagagtcaaactatgagaattaagtaaaaataaatattttaaaatgaaatattaatatatacaaaaattagatcaaaaattattttgcttatattcttttctgtttcactaacatttagtagaagaaaccgcaagctgaattctaacacaagaatgaaaatcaggcctggcgcagtggctc

SEQ ID NO: 3939 - DNA, 21 bp, Homo sapiens
tttggcttgctgctacttgat

SEQ ID NO: 3940 - DNA, 23 bp, Homo sapiens
cccagaatagaacatacccaaca

SEQ ID NO: 3941 - DNA, 160 bp, Homo sapiens
tttggcttgctgctacttgatggtttgggaataggtaccttaatctcatcagaaaaccatttcaacacataggataggatgagttagttttgtaaaaggtttttgtgaatcaccatttctatctataaagtttagattgttgggtatgttctattctggg

SEQ ID NO: 3942 - DNA, 20 bp, Homo sapiens
tggcttgctgctacttgatg

SEQ ID NO: 3943 - DNA, 21 bp, Homo sapiens
ccggaatagaacatacccaac

SEQ ID NO: 3944 - DNA, 157 bp, Homo sapiens
tggcttgctgctacttgatggtttgggaataggtaccttaatctcatcagaaaaccatttcaacacataggataggatgagttagttttgtaaaaggtttttgtgaatcaccatttctatctataaagtttagattgttgggtatgttctattccgg

SEQ ID NO: 3945 - DNA, 2001 bp, Homo sapiens
tttgacctaatactttcattattgaattattttgattcttaaaagctttaaatttgagttactgttattattttgtgcttgcttattatactacgtctataagaatatagttatacttttatataggagcaaggagaatctcattgtttttaatgtatttgctcataaggtaatcccattaaatgtatcctgaactggcattttgtgaggtatgttaaaacaataacctagctgctattcttcagaattgcagtgtcatgttgacagaatttgttaatgaatgcttacttttacttaattgtgaatcctgaaaaaatgttgcaatagaatatatcaggaacaaatgggagaaacaggataggtaaagctatttaagttggacttgccatgagacagctttggtcctcatatttaccatttagaaattcagtgtttatcaatttactgtgggatttacttagactgataaataaaagagtgatttatacagtaaaatattgttactaatttacaaaaggaaatattaatgaagatagttcttagtgtagggcaccttttcctttttccagaatggttaggtttactaagaaaatcacatataaatcaaaacattgttagtgcctctcaagttatattcctatatagccattctttcagtttttactttgggaattttggggtaaagaatggcatgcagtctccagatgataccatccggataatactgggagacaaatctgtaccagactatttctttaatatgcatacatacctctacctttctgctttattttaataaccagttataattctcagacatagcagtttttaaaaccgttacacttttggcttgctgctacttgatggtttgggaataggtaccttaatctcatcagaaaaccatttcaacacataggataggatgagttagttttgtaaaaggtttttgtgaatcaccatttctatctataaagtttagattgttgggtatgttctattccggggcctctttgttaccttcatttttgaaaaatttcaaagtgtgctatctttaacaaatgcttctagataggaattgtttggatacccttttgggattacatgaaaattattatttcttttgttctctacagtgatctaaagatgcttttggaaactcggggaaagctctgctgtacattcagtgtttttttttttcccctcttaccgtcttgctcttgttttgaagcattctatctctagtctaccatatgactatatatatttgattattaggctaggtgccccctgacccaaaagtatccctcagccaagaaggaattatattatctgacttattacaaagtcttttgtattactttccacttgcccagttactgtttttcatccagttgtttttcttgtgtgtgtttgtagcaacatgacttgatttttaaacagttttttaaaatttagcatagctaatcataactgttactagggttataacttaataatttgcaagtgttggatgtcattaacacttgttggattaagttaaaaagtagcttatggagataagaatatgtacttatgtgatgagtgaaaaaaagaaaagttgtcctaattaagtacaaatggacatttggttacacagaattcctaggaacagcatcatacagaaagtgttagaactcaaacttatactgaaatgatgatgtagatgtgctatgtaaacctgtgttaggtaactcataatgacttctgtgatgaagaaacttctgttgctaaaaatatgtgaataaattggacaaaatcatttcatgaaatagagtagaaaggatatacgtaacattttaattatgaggacattgactttcaccagaatttatagattcaaattgtataaatgattttctttctttaaataaaagtataggaaaaattctataatgtacataagattattttagtccatcagtatacatcctcacatttatttgttgggtttttttcttcatc

SEQ ID NO: 3946 - DNA, 2001 bp, Homo sapiens
ggcattttgtgaggtatgttaaaacaataacctagctgctattcttcagaattgcagtgtcatgttgacagaatttgttaatgaatgcttacttttacttaattgtgaatcctgaaaaaatgttgcaatagaatatatcaggaacaaatgggagaaacaggataggtaaagctatttaagttggacttgccatgagacagctttggtcctcatatttaccatttagaaattcagtgtttatcaatttactgtgggatttacttagactgataaataaaagagtgatttatacagtaaaatattgttactaatttacaaaaggaaatattaatgaagatagttcttagtgtagggcaccttttcctttttccagaatggttaggtttactaagaaaatcacatataaatcaaaacattgttagtgcctctcaagttatattcctatatagccattctttcagtttttactttgggaattttggggtaaagaatggcatgcagtctccagatgataccatccggataatactgggagacaaatctgtaccagactatttctttaatatgcatacatacctctacctttctgctttattttaataaccagttataattctcagacatagcagtttttaaaaccgttacacttttggcttgctgctacttgatggtttgggaataggtaccttaatctcatcagaaaaccatttcaacacataggataggatgagttagttttgtaaaaggtttttgtgaatcaccatttctatctataaagtttagattgttgggtatgttctattccggggcctctttgttaccttcatttttgaaaaatttcaaagtgtgctatctttaacaaatgcttctagataggaattgtttggatacccttttgggattacatgaaaattattatttcttttgttctctacagtgatctaaagatgcttttggaaactcggggaaagctctgctgtacattcagtgttttttttttccccctcttaccgtcttgctcttgttttgaagcattctatctctagtctaccatatgactatatatatttgattattaggctaggtgccccctgacccaaaagtatccctcagccaagaaggaattatattatctgacttattacaaagtcttttgtattactttccacttgcccagttactgtttttcatccagttgtttttcttgtgtgtgtttgtagcaacatgacttgatttttaaacagttttttaaaatttagcatagctaatcataactgttactagggttataacttaataatttgcaagtgttggatgtcattaacacttgttggattaagttaaaaagtagcttatggagataagaatatgtacttatgtgatgagtgaaaaaaagaaaagttgtcctaattaagtacaaatggacatttggttacacagaattcctaggaacagcatcatacagaaagtgttagaactcaaacttatactgaaatgatgatgtagatgtgctatgtaaacctgtgttaggtaactcataatgacttctgtgatgaagaaacttctgttgctaaaaatatgtgaataaattggacaaaatcatttcatgaaatagagtagaaaggatatacgtaacattttaattatgaggacattgactttcaccagaatttatagattcaaattgtataaatgattttctttctttaaataaaagtataggaaaaattctataatgtacataagattattttagtccatcagtatacatcctcacatttatttgttgggtttttttcttcatcccttatttttcatgtctgtgccctttcttctcatgcatgtgtgtgtgcctgtgcatatgttgtgtgtgtgtatgtgtgtatgtgtttgtgtgtttttaagggacagggtctccctatgttgcctaggctggagtgcagtggctgctcacaggtacagtcataggacactgcagccttgaacttttgggctcaagca

SEQ ID NO: 3947 - DNA, 21 bp, Homo sapiens
tcatgtctgtgccctttcttc

SEQ ID NO: 3948 - DNA, 21 bp, Homo sapiens
gccaggagttagagatgagca

SEQ ID NO: 3949 - DNA, 284 bp, Homo sapiens
tcatgtctgtgccctttcttctcatgcatgtgtgtgtgcctgtgcatatgttgtgtgtgtgtatgtgtgtatgtgtttgtgtgtttttaagggacagggtctccctatgttgcctaggctggagtgcagtggctgctcacaggtacagtcataggacactgcagccttgaacttttgggctcaagcagtcctaccacctcagccttccaaagagctggggctacaggcgaatgtcactgtacctggcttcatatggatcaagctgctcatctctaactcctggc

SEQ ID NO: 3950 - DNA, 2001 bp, Homo sapiens
gtgtatgtgtttgtgtgtttttaagggacagggtctccctatgttgcctaggctggagtgcagtggctgctcacaggtacagtcataggacactgcagccttgaacttttgggctcaagcagtcctaccacctcagccttccaaagagctggggctacaggcgaatgtcactgtacctggcttcatatggatcaagctgctcatctctaactcctggcttagtgacttctgccctgagtaatagactcaatctctgttgccgatgagttgcatgtgctatgttattttagtctcttttcagctaggtgatgtggcataaattttgactgttacctccctaagaacagcattctattgtagctaaaaatataaatattaattcaaatgtaggttatggagtgacaaacagatttttaaaagatagatacagatttttaaaaaagataatatctattatttttaattctatttatattaaaatatttatgtagcagacatttgcagaaatacaggtaggctcaagttccaatagctcacttgtaaaccagttgcctttggggaaaatgcactgtgagtttgtacacaggttcccagctggccctctgaaattagtttggccctgtgtagttagctcagtagaatattatgtttttttttttcctttgggaaagtatgcctgaatctcaacattgagagtacttttctccttttcctctgcagctccatcctctgaaaggagacttctaactggaatgctttacctcaatccccaaaggagactgtggcaagagggctaaatccctggagccatggccattgatatcagggccttttctgagtcctttggggggcagcttatatatggaaaactgtaagccttattaaaaacattcatattctttctgatccctcttaattaacattttctaaatttataggtaatatttgagtactaaacccttctttctcccttctcaccagcattctctccatccaccaaaaatgaaaggtgggagagctatggaactgaattgcaaacactgcaggaattaacttgcccattttctttgggaaaaagccaaagggggtttttctatcattgtgagtaagtagaggtgttcccaactccccaccccttcaggcataccagtaaaaaagctaaaacttgaggccaattggccatcttaagagctttacaaaaaaatggttaattctttttcccattagtaatttgcccacaatgtaaacagccataggatggactgatttttaggcagacagtagaaagaaggcagcactgctattgttacaaatgtttagttttcatctcctgaaagagtgttaagaaaagttagtccagatatactgatggatggaacttacaatttacgataggattagtgtgcccgtttgtgtgttttccccatgtctagggcataaggcatactgctttcaaattctgctaatttttgttttcatctgccagatttttttggtattatttaatttttagttctttttctacaagatactattagcagaacagacagaactttaaagccaaaaaaattaagttcagtttttcgcaataaatatgctagtggttgtttctgccatagctcactagaagcaccgttttcttaacttggtagttgggaacattcagagatctcagaccacacaaagagaaacagggatttaagaatgatctagggccaggcacggtggctcacgcctgtaatcccagcactttgggaggccaaggcgggcggatcgcctgaggtcgggagttccagaccagcctgaccaacgtggataaaccctgtctctactaaaaatacaaaattagctgggcgtggtggcacatacctgttatctgtcgcagctactcgggatgctgaggcaggagaatcgcttgaacctgggaggcagaggttgcagagagccgagatcgcgccattgcactccagcctgggcaacaagagcaaaactccatctcaa

SEQ ID NO: 3951 - DNA, 25 bp, Homo sapiens
agtccctagtcagttaccttttatg

SEQ ID NO: 3952 - DNA, 25 bp, Homo sapiens
ttttggattataccttcatgttttt

SEQ ID NO: 3953 - DNA, 401 bp, Homo sapiens
agtttacactagaaaacaatggtttaggattattgtaaaaaatgcaattggttccataaaaatccctagaaaaataataaaaacttcttggccgggcgtggtggctcaagcctgtaatctcagcactttgggaggccgaggcaggcggatcacctgaggtcgggagttcgagaccagcctgaccaacatggtgaaaccccrtctctactaaaaatacaaaattagccgggcatggtggcgcatgactgtaatcccagctactcgggaggctgaggcaggagaatcgcttgaacccaggagacggaggttgcagtgagccaagattgcaccattgcattccagcctgggcaacaagagcgaaattccatctcaaaaaataaaaataaaaataaataaataaa

SEQ ID NO: 3954 - DNA, 24 bp, Homo sapiens
cacaattacaggaagggtttatga

SEQ ID NO: 3955 - DNA, 22 bp, Homo sapiens
gaaaccagtacctgatgaacga

SEQ ID NO: 3956 - DNA, 331 bp, Homo sapiens
cacaattacaggaagggtttatgatctattatgatctgctggtaataattgtcagttgctctggaatcagctgagagtccagtgaagtaatccaagtagagtagagaataagtttaaactaagtcaccagacagaccggtgtgtgtctatgcacttttaccccctttgggaaaagttaaactgttacagcacagctgtcctttgtcacccagaaacctcaagagtaatcactggcagggcttatgcatttagatcagatagtggaaaataaatgtgtaacttttgtaatttgaatagaaaatacaagtatcgttcatcaggtactggtttc

SEQ ID NO: 3957 - DNA, 20 bp, Homo sapiens
tgtcagctgctctggaatca

SEQ ID NO: 3958 - DNA, 20 bp, Homo sapiens
tttctgggtgacaaaggaca

SEQ ID NO: 3959 - DNA, 162 bp, Homo sapiens
tgtcagctgctctggaatcagctgagagtccagtgaagtaatccaagtagagtagagaataagtttaaactaagtcaccagacagaccggtgtgtatgcacttttaccccctttgggaaaagttaaactgttacagcacagctgtcctttgtcacccagaaa

SEQ ID NO: 3960 - DNA, 2001 bp, Homo sapiens
gaagtaactaatttgcttttgattttacaggcttataggtggaagtgacttgccttgtctgtgataaaactttgggcttggacttttgagttaatgctggaatgagttaagactttgggggacagttggcagcacgtgattgtgttttgaaatgtgaggatgagagatttgggaggggccagggtgaaatgatggcttggctctgtgtccctacccaaatctcaccttgaattgtgataatccccatgtgtctagagtaggaccagatggagataattgaatgatgggggcatttctgcccttcagttcttgtgataatcagtgagttctcatgagaactgatggttttataaggggcttccccgttcgcttggtattcatttctctctcctgctgccctgtgaagcggtgccttctgccatgattgtaagtttcctgaggcctcctcagccatgtggaactgtgagtcaattaaacctcttttctttataaattacccagtcttgggtatttattcatagcagcatgagagtggactaatacagtgttcagctcatcctacagcccctcttccctccctggaggttgagagttgggacttcagtccaaccctctaatcaggaggttggttcccctggaaaccagccccggctcctgaggctatccaggagcccccaggcaccagtcaagctaatagtgaacaaaaagacaccagtttggagattccaaggattttaagagtttttgccagaaaatggggatgaagaccaaatacatatttcacaatatcatacaggtactcaactcttccaaatctgatatttatgcattttgtaaacttctaaatatatttcccaacttaaaattataagcccaaaccagttattcagtaacattttaagttggaatcagaagtttaattttttagatacattaatatgcaggacttcttaatccaagtatttaaaaataacaaatatttaatatatacctattatgcagacactcaacacaaaattattaatttgtggactttatgtttttccatcctaatttcaacccacactctttccctctcaaaaacttttctttttttttaaagaaatttgatcatacctgtattctaaacctgcctggcccataaagacctttttatttttgtctcaagtgatttgaggttaacttttttttttttgaaatggagtatcactgtgtcacccaggctggagtgcggtggcatgatcttggctcactagaacctccacctcccaggttcaagtgattctcctgcctcggcctcccaagtagctgggattacaagtgcccaccactacgcctggctagaggttactcttttaaagccaatttggggtcatgttctcagataactgagattgaatcttgtgaaaacatgtggggtctagagctatagatgtctgggtgatttttctcatgaaattgggataagttgagcctagttgtattacctctgccagtagtgactctaggtcttgccttcccagtgagctgttctccaagcctgccacctgtggactcaagttccccatcactgaatcctcctgtgtgatgggccttcagccccacacccaggatgtttggctgacttattttatttaatctgttacttgattctgtcctgtgttcttttattctttttgtttggcaggccacaatttttaagtattttaaatgtttaactattttaaaataaaacccacctggattttgcatgtcttccatatcttacctggttttacagtcacagttctaaggtcattctcatgacagttttaacttccaattttctggaatacgaagaatgtatcctaaaaaacggttgcacagagcccataaagaggcattatatttggatcacaaccttgatttcttcacatatactgtaatgtgatacctttgttctccaattgtatgataaggcttttggcatggactgtatacctgtgctgtccagtgggaatg

SEQ ID NO: 3961 - DNA, 27 bp, Homo sapiens
tgcttatacatctcagcatttactcat

SEQ ID NO: 3962 - DNA, 23 bp, Homo sapiens
tcacaatttgcttaaggtgtgtg

SEQ ID NO: 3963 - DNA, 337 bp, Homo sapiens
tgcttatacatctcagcatttactcatagtgtgtatatacacatgtatatatagatatatgtatgtgtatatacacacgtgtatacacacacacgtgtatgcacacacgtgtatacacacacgtgtgtacacacatatgtgtgtagatacacacgtgtatacacgcacgtgcatacacgcacgtgcatatatacatatatagacacatacgtgtatatacatatgtgtgtgtgtgtacatatatatgtacatatatacacgtatatatgtgtatatatgtataatatacacatacgcatgtgtatatatatacacacacaccttaagcaaattgtga

SEQ ID NO: 3964 - DNA, 21 bp, Homo sapiens
aatttgcagcagtctctatgg

SEQ ID NO: 3965 - DNA, 22 bp, Homo sapiens
caaagagccaagaatagcgaag

SEQ ID NO: 3966 - DNA, 216 bp, Homo sapiens
aatttgcagcagtctctatggcataagctaaattttcatttctggtggcttgtttctgggctctctgttctgttctgttctgttctgttgatctgcttgcctgtgccattaccataccatccttatcagctttaaaacatgactcttgatagccagtgggttaaacctcctaccatattcttttttaggagagacttcgctattcttggctctttg

SEQ ID NO: 3967 - DNA, 20 bp, Homo sapiens
tcctttcctcaccctcacac

SEQ ID NO: 3968 - DNA, 25 bp, Homo sapiens
caatgttacttcctgaagcattaga

SEQ ID NO: 3969 - DNA, 285 bp, Homo sapiens
tcctttcctcaccctcacacttgtgaatctcatgttctgttctgaggaaaagaaatgaataggaaaataaatacttgtgtatctagatcctatcactgtgcgtggtacattgtggctctcagtttgttgtgtgaatgaataaatatagcagaactacttgagctttatggttttcattggtctctcttttatgtggtacagcaggtaaaaaatggttcaatcttttagagaaagaatcagtcactaattttttttatatttctaatgcttcaggaagtaacattg

SEQ ID NO: 3970 - DNA, 21 bp, Homo sapiens
gcctatttggtgtaaggcagt

SEQ ID NO: 3971 - DNA, 20 bp, Homo sapiens
cctaaagcccacattcttgc

SEQ ID NO: 3972 - DNA, 396 bp, Homo sapiens
gcctatttggtgtaaggcagtatgttttcttagaaagaataagggccaagcgcagtggctcacgcttgtattcccagcactttgggaggccaaggtgggaggatcccttgaggccagggttttgagaccagcctggataatacagtgagactctgtctctaccaaaaaaataaataaataaataaaaaattagccgggtgtggtggcatgggcatgtagcagccccagctactcaggaggcggaggtgggaggatcacttgagcccaggagtttgaggctgcagtgagctatgattgcaccactgcaccccagcctggctgacagggcaagaccctgtctcttaaaaaaacaaaacaaaacaaaaacacaaaaaaagcaagaatgtgggctttagg

SEQ ID NO: 3973 - DNA, 22 bp, Homo sapiens
agcacgtactgctatgactgga

SEQ ID NO: 3974 - DNA, 19 bp, Homo sapiens
ggtggcatgtgcctgtact

SEQ ID NO: 3975 - DNA, 215 bp, Homo sapiens
agcacgtactgctatgactggatataataagtactgagtaaatatttgtttttattatattattattattattattttgagacagggtcttgctctgttgcccaggctggagtgcagtggtgcaatcatagctcactgcagcctttacctcccgggctaaatctgtctactaacctcagcctcttgagttgctgggagtacaggcacatgccacc

SEQ ID NO: 3976 - DNA, 22 bp, Homo sapiens
agcacgtactgctatgactgga

SEQ ID NO: 3977 - DNA, 19 bp, Homo sapiens
ggtggcatgtgcctgtact

SEQ ID NO: 3978 - DNA, 215 bp, Homo sapiens; identical to SEQ ID NO: 3975

SEQ ID NO: 3979 - DNA, 22 bp, Homo sapiens
gagaaacacacgcacacataca

SEQ ID NO: 3980 - DNA, 21 bp, Homo sapiens
cagccagttgattcaccttta

SEQ ID NO: 3981 - DNA, 110 bp, Homo sapiens
gagaaacacacgcacacatacaggtacatatgtatgtatgtatgtatgtatgtatgtactatgtggtatggaaacttttttaaaacaattaaaggtgaatcaactggctg

SEQ ID NO: 3982 - DNA, 22 bp, Homo sapiens
ctaacagcaggttcagatgtcc

SEQ ID NO: 3983 - DNA, 20 bp, Homo sapiens
accactgctttaaccctcca

SEQ ID NO: 3984 - DNA, 210 bp, Homo sapiens
ctaacagcaggttcagatgtccttgtctgtcaaaacatatatttaaaaatcagctattttgcagtttggttgtcaagctatattccaagataaattacaatgtaggtaggtaggtagatacattgatttatatctatatttacatttgtatatctagtatgtatgataagtcactaatcactggtctggatggagggttaaagcagtggt

SEQ ID NO: 3985 - DNA, 20 bp, Homo sapiens
cagctgatcggaagctcttt

SEQ ID NO: 3986 - DNA, 19 bp, Homo sapiens
gcgctggacagagactgat

SEQ ID NO: 3987 - DNA, 163 bp, Homo sapiens
cagctgatcggaagctctttcgtcttgtctccaatgactccttcatctctattcagccttccttatcctcttgtggacaggacttgccaagggacttcagtgacaaagtgaacctgccaagtcataaccaccaccaccatgttgatcagtctctgtccagcgc

SEQ ID NO: 3988 - DNA, 20 bp, Homo sapiens
ctctggttccttggcttgtc

SEQ ID NO: 3989 - DNA, 20 bp, Homo sapiens
cagccaagaacgatgctacc

SEQ ID NO: 3990 - DNA, 246 bp, Homo sapiens
ctctggttccttggcttgtcaaaaagtaggccagtcctttaaaatgttttcacagatggaaattattttaattcagaattgatgcttagaaattgggcagtgtttggcttcccagaaaatgacacttaaaaacatttatttatttacttattttttgttatttccaacaagaatgagcttgaaaagcatttgttttttcattggaacaaaatctttgtatgttgatggtagcatcgttcttggctg

SEQ ID NO: 3991 - DNA, 26 bp, Homo sapiens
ttgagtgattgcatcagtataacaaa

SEQ ID NO: 3992 - DNA, 27 bp, Homo sapiens
tcataataagtttaagaggaaccttca

SEQ ID NO: 3993 - DNA, 409 bp, Homo sapiens
ttgagtgattgcatcagtataacaaaaggaaacagctaaattatctgaagggtcctcttatttttattttatttattttgtttttaattttattttattttagatggagtttcactcttgttgcctaggctggagtgcagtggcacgatcttggctcactgcaacctccgcctcttgggttcaagtgattctcctgcctcagcctcccgagtagccgagattacaggcgcctgccaccacacccgctaatttttgtatttttagtagagacagggtttcatcatgttggtcaggctgatctcgaactcctgacttcaggtgatccacccacctcggcctcccaaagtgctgggattacaggcgtgagccactgcgccaggcctgaaggttcctcttaaacttattatga

SEQ ID NO: 3994 - DNA, 23 bp, Homo sapiens
tgtaaagtgtggtcaattggaga

SEQ ID NO: 3995 - DNA, 22 bp, Homo sapiens
ccacaatgttatgaatggatgc

SEQ ID NO: 3996 - DNA, 141 bp, Homo sapiens
tgtaaagtgtggtcaattggagagagatatatatttatatatatttattaaatttttcaagctctgtattgtggtaaacaaaaacatcattactttttccagtagtcctaagtaagaaagcatccattcataacattgtgg

SEQ ID NO: 3997 - DNA, 24 bp, Homo sapiens
tgagcatttgaaatattagcagga

SEQ ID NO: 3998 - DNA, 23 bp, Homo sapiens
catgtattgcagaatgaccatga

SEQ ID NO: 3999 - DNA, 210 bp, Homo sapiens
tgagcatttgaaatattagcaggaccaaggaacttaagttttaatttggatagtcacaggctactgtatcagacagcatagttccagaatatattctattatcataaccacaggcttaagatatatatatatatatatatatatatatatatatgtatgtatgtatgtttcaacatagccttttatttcatggtcattctgcaatacatg

SEQ ID NO: 4000 - DNA, 24 bp, Homo sapiens
tgtatcagacagcatagttccaga

SEQ ID NO: 4001 - DNA, 22 bp, Homo sapiens
tgtattgcagaatgaccatgaa

SEQ ID NO: 4002 - DNA, 144 bp, Homo sapiens
tgtatcagacagcatagttccagaatatattctattatcataaccacaggcttaagatatatatatatatatatatatatatatatatatgtatgtatgtatgtttcaacatagccttttatttcatggtcattctgcaataca

SEQ ID NO: 4003 - DNA, 20 bp, Homo sapiens
caccacacccagctagtacg

SEQ ID NO: 4004 - DNA, 19 bp, Homo sapiens
ctgatatgccaggcgcagt

SEQ ID NO: 4005 - DNA, 208 bp, Homo sapiens
caccacacccagctagtacgtgtgtgtgtctgtgtgtgtgtgtgtgtgtgtgtgtgtgtgtgtgtgtgtgtgtgtgtgtgtgtgtagagatgaggtctcactatgttgcctgggcttgtcttgaactcctgggctcaagcagtcctcccactttgcctcccaaaatgctgagatttactggcatgagctactgcgcctggcatatcag

SEQ ID NO: 4006 - DNA, 20 bp, Homo sapiens
caccacacccagctagtacg

SEQ ID NO: 4007 - DNA, 19 bp, Homo sapiens
ctgatatgccaggcgcagt

SEQ ID NO: 4008 - DNA, 208 bp, Homo sapiens; identical to SEQ ID NO: 4005

SEQ ID NO: 4009 - DNA, 20 bp, Homo sapiens
ggaaagcaaacatgggaaga

SEQ ID NO: 4010 - DNA, 20 bp, Homo sapiens
tgatggcagcaactctcatt

SEQ ID NO: 4011 - DNA, 312 bp, Homo sapiens
ggaaagcaaacatgggaagatgattgttttattgttttctacttttaaatggtatgggaaccttgagatagcaaaatgctgcctagtactatgccaaatacagtcaacttttgatgctttctgaggaaaagaaaactggtaaactgatggatggatgagttgaagttaaatatagtatagtaatttgtatagcctcaggtgagcagcttgccaaaacaaacaaacaaacaaacaaacaggggtgagggatttggaaatatagtaacaacaatgataagagactgtgggaagaaatgagagttgctgccatca

SEQ ID NO: 4012 - DNA, 27 bp, Homo sapiens
tgagatagattcatgtgtgtgtatgaa

SEQ ID NO: 4013 - DNA, 23 bp, Homo sapiens
ggtagtgacaaacacctctgctt

SEQ ID NO: 4014 - DNA, 158 bp, Homo sapiens
tgagatagattcatgtgtgtgtatgaaataaaaataatcttcattgatatatatatatgtatatcttgagcatcatattgtttctcttacaatgtcaatttaataaatatagaattgtcttagcaactttgatagaagcagaggtgtttgtcactacc

SEQ ID NO: 4015 - DNA, 20 bp, Homo sapiens
cagggacagagcaaactggt

SEQ ID NO: 4016 - DNA, 22 bp, Homo sapiens
gagcttgagaatgaaagggaga

SEQ ID NO: 4017 - DNA, 405 bp, Homo sapiens
cagggacagagcaaactggtaccacaggcggaactccccaaaggcaaacttcatggctctttctaggcactgtggttcattgtctcatgccaagaaagaattcaagacacggacacacacaaggagtgggtttaagagtggaaagattaatagacaaagaagaagagagagagagagaaagtttcctcatgctgagaaagcaggtcgctcaagagagggtctcccagaggcttgacttactttctctcaccccagcctgcactacacatgtagcctctcttgtctccctcatatacctgatgtgtttgctttattatcactgtgtaaatgctcttccttcatatcttttgttttctcctatactttgctttcatatgtatttatctccctttcattctcaagctc

SEQ ID NO: 4018 - DNA, 20 bp, Homo sapiens
ggcaaacttcatggctcttt

SEQ ID NO: 4019 - DNA, 22 bp, Homo sapiens
gagggagacaagagaggctaca

SEQ ID NO: 4020 - DNA, 248 bp, Homo sapiens
ggcaaacttcatggctctttctaggcactgtggttcattgtctcatgccaagaaagaattcaagacacggacacacacaaggagtgggtttaagagtggaaagattaatagacaaagaagaagagagagagagagaaagtttcctcatgctgagaaagcaggtcgctcaagagagggtctcccagaggcttgacttactttctctcaccccagcctgcactacacatgtagcctctcttgtctccctc

SEQ ID NO: 4021 - DNA, 24 bp, Homo sapiens
gaggtacatcatgaggttgtttga

SEQ ID NO: 4022 - DNA, 22 bp, Homo sapiens
aaagcaatgctaaagggaagtg

SEQ ID NO: 4023 - DNA, 128 bp, Homo sapiens
gaggtacatcatgaggttgtttgaactctttctacttttttgatggaggcatttattgctactatactatactatactatactatactatactatactatactatacacttccctttagcattgcttt

SEQ ID NO: 4024 - DNA, 20 bp, Homo sapiens
gtgtgaatccgtccagtcct

SEQ ID NO: 4025 - DNA, 21 bp, Homo sapiens
tgcatctataggcacaagcaa

SEQ ID NO: 4026 - DNA, 124 bp, Homo sapiens
tcctggactctttggttggtagactttttaggtttgtatgtacgtgcgtgtgtgtgtgtgtgtgtgtgtgtgtgtgtgtataaaaatatatatacatatattgttgcatgtatagtcacaagca

SEQ ID NO: 4027 - DNA, 20 bp, Homo sapiens
tgcgtgatttctggagtttg

SEQ ID NO: 4028 - DNA, 22 bp, Homo sapiens
gacttgaagcatagaagcagca

SEQ ID NO: 4029 - DNA, 389 bp, Homo sapiens
tgcgtgatttctggagtttgctacaatttgttaatgaatattctaaggcaaatccatcacatactttcaattgcaataaaatatgtatttttttctaaatcttatgtgtccttgcattcatttttcccactttctggttttccccctttgtaaagctctctctctctctctaaggtacctactgtcaacaacgggaagtggaggccattactgaaggtgtagaggaagatgaaggattttgctgttgtgaacctggccatattcctcacatgctttcatttaatgctgcatttagccagcgatggctagcttgggaagtgatagtcacaaagtacattctggagggttatagcatcactgataacagtgctgcttctatgcttcaagtc

SEQ ID NO: 4030 - DNA, 22 bp, Homo sapiens
tgcttcaagtctttgatcttcg

SEQ ID NO: 4031 - DNA, 20 bp, Homo sapiens
acttggaagcaaagcatacg

SEQ ID NO: 4032 - DNA, 166 bp, Homo sapiens
tgcttcaagtctttgatcttcggaaagtactcaccacttactatgtcaaggtaggagtatgtgcctacttagatctttagataatcagagtttcttcttgggaatgacatatataagtatatatatatgtatatacttttttttaacgtatgctttgcttccaagt

SEQ ID NO: 4033 - DNA, 20 bp, Homo sapiens
tggcctccttggttagatgt

SEQ ID NO: 4034 - DNA, 20 bp, Homo sapiens
acctagggaacccagaagac

SEQ ID NO: 4035 - DNA, 245 bp, Homo sapiens
tggcctccttggttagatgtattcgtgtgtgtgtgtgtgtgtgtgtgtgtgtgtgtgtgtgtgtgtgtgagagagagagagagaacattgtagatgggattgcattattgatttggttttcggcttgaatattattggttaatagaaatgctactgattttagtatgctgattttgtatgctgaaacttgaagtcatttatcagttccaggagctttttggcagagtcttctgggttccctaggt

SEQ ID NO: 4036 - DNA, 20 bp, Homo sapiens
tggcctccttggttagatgt

SEQ ID NO: 4037 - DNA, 20 bp, Homo sapiens
acctagggaacccagaagac

SEQ ID NO: 4038 - DNA, 245 bp, Homo sapiens; identical to SEQ ID NO: 4035

SEQ ID NO: 4039 - DNA, 22 bp, Homo sapiens
tgacttcaagtttcagcataca

SEQ ID NO: 4040 - DNA, 18 bp, Homo sapiens
tggcctccttggttagat

SEQ ID NO: 4041 - DNA, 344 bp, Homo sapiens
  misc_feature 57, 247, 260, 272, 277, 295, 309, 313: n = A,T,C or G
aaatgacttcaagtttcagcatacaaaatcagcatactaaaatcagtagcatttctnttaaccaataatattcaagccgaaaaccaaatcaataatgcaatcccatctacaatgttctctctctctctctcacacacacacacacacacacacacacacacacacacacacacacacacacacgaatacatctaaccaaggaggccaaagatctctacaaagagaactacaaaacactgctgaaggnaatcagacatganacaaatgggaanacatnccatgcttatggactggntgaatcaatactgntaanacagccatactgcccaaggcaatctacagct

SEQ ID NO: 4042 - DNA, 22 bp, Homo sapiens
gctagctttcaagcatctttcc

SEQ ID NO: 4043 - DNA, 21 bp, Homo sapiens
aactgggtctctgtccaaagt

SEQ ID NO: 4044 - DNA, 293 bp, Homo sapiens
gctagctttcaagcatctttcctcctaaataaatatgtgacttgagaaaaaggtaataatgattttgtcagaattctttgaatttatatttactagctacttaaccataaactgctgtccagattgttaatttcatttatatttattttaattaatttgtcatgaatatggacaaagccttttctggggtgtgtgtgtgtgtgtatgtttgttttttaagtcgtcattattcattcgtattctttttctgtgtaatgtaatcatataaagttactttggacagagacccagtt

SEQ ID NO: 4045 - DNA, 2001 bp, Homo sapiens
agaactttaatttttccaagaatctagattaacataagatgttgatatttaaggaacttggaagagtaagtggtgaggctgtatgtatattttttaagagattaccttttaggaaattagtgaacaaacttaaccagtgttctgccttctttgactttgttactggaggatgataatctatttctattagattcgaagtattttggaaaatatttcaagtatatctgaactacttataattcttaaaacagaagtagtcagacaatatttgtatcctaagtgagatatggaaaattactctgtatactaaatgtcaggcaatgaaaatgtaagtttttgtgtagaaaacccattaagaagatgtgtttttctttctgaattagtttatttttccatcacataccaaaatataaaaatcagcctcacatttttcagcaagtttagcttatagccttgataaattcctctgtgcttctgagcagcatccttctgcctctgcttagcagctctgcatttggtggattgctgttgtgagtcattcatccagcactgggccttttaagctgaagattcacccagtgtctaaagttgtccttttcttatagctagctttcaagcatctttcctcctaaataaatatgtgacttgagaaaaaggtaataatgattttgtcagaattctttgaatttatatttactagctacttaaccataaactgctgtccagattgttaatttcatttatatttattttaattaatttgtcatgaatatggacaaagccttttctggggtgtgtgtgtgtgtgtatgtttgttttttaagtcgtcattattcattcgtattctttttctgtgtaatgtaatcatataaagttactttggacagagacccagttaattttctcttttgataggatacatggtttagataaggtataaagtgtccctttttattctagaggcttttcctttaattcagagattagtggagataataacatcagtcaaggctaatgtggtacatggaacttgctaatggaggttggacattctgtttcagtcttacatggatattgtttcattggtgttgaggaagaaaaaaattagatactaccatgcattgggacagcataattctaatattacattgaatatggctttttaaaaataagtattaaaaagccaatcgttttctccatttatctatcttttttgtttgtttttaatttggttgattgatatgcacccaggccgtcttatttttacttgttaaatgtctgtctaggaagaactgtgattggaaaggaattaattattatacaaataaatctggtaggatatgagtggagtaagtttgcttgaaacagaagtatattttctactttgaatcacctcaccagagtcatctgtcaagaattatgtataacaatttatctttattgcctacatacaacatactttttctgaattaagataacttctatttgtgagttgaacttcattatctgccattttgtggaatcaaccttacattctttggtggaactagagctgattgtcaccacaaggttatatgacaactctgttctaagacttatacctattatatagggttataccttttttcttatgcctcagctctgtacctgacaatttatgattcagtggagccaagctagaaggaacaaaggtcatctaacactgtgatggggatgaattcctgagttttacctgcacaatgaggtggtgccccggaattcacaacagagtagtgatagagcataagatggctgctccagatgactcttgggtttagtgtacttgtgattgaacaagattttttatctatgaagcttgattctacaaccaaaataatagaaatgggggggggggggggaatcatgtctgcttatgctttttaaaagcttatagtttaagtaaaagtaaaatgtaaaaactgattaaacctatacaagtctggcaatgagctctgcatgagg

SEQ ID NO: 4046 - DNA, 21 bp, Homo sapiens
gctgattgtcaccacaaggtt

SEQ ID NO: 4047 - DNA, 20 bp, Homo sapiens
tccttctagcttggctccac

SEQ ID NO: 4048 - DNA, 121 bp, Homo sapiens
  misc_feature 61: n = A,T,C or G
gttccttctagcttggctccactgaatcataaattgtcaggtacagagctgaggcataagnaaaaaaggtataaccctatataataggtataagtcttagaacagagttgtcatataacct

SEQ ID NO: 4049 - DNA, 20 bp, Homo sapiens
catggcctttaccagcattc

SEQ ID NO: 4050 - DNA, 20 bp, Homo sapiens
gcacatgtttacaggccaaa

SEQ ID NO: 4051 - DNA, 345 bp, Homo sapiens
catggcctttaccagcattcagtataaaccagagataaggacatatgtacttacgtgtgtctgtgagtgtgtgtgtgtctgagtgttattctgaacagcttgtaaatattgtagttgtttaaaatggaaaataaaagctgagttcttttggcaaatatattgcatcaaaaatacagtattgacagtggataaaacactgaggaaataaattttttttcattttgccttctgtccattttttgtcaaactgagaaaaattagagtacactatattaagttctgtatggcatgttcacacttggttctgaaatcattttaaacaagctttggcctgtaaacatgtgc

SEQ ID NO: 4052 - DNA, 20 bp, Homo sapiens
gcattggcgtctccagtaat

SEQ ID NO: 4053 - DNA, 23 bp, Homo sapiens
ttccagctcttatgtcagctttc

SEQ ID NO: 4054 - DNA, 276 bp, Homo sapiens
gcattggcgtctccagtaattagatggcttggcataacaccaaggctcaccttttctcctggctcacctgccattggccacacagcaagcctcatggaaactggacatgaggcctttaaaaatccaagatcctcagtctcttctcttctagataacatggaaaataaaatcaaatttgggacgcattttttcatagggaaatttttattaacattaactcctcaaaagtacaaggtgtgttttagataaaggagaaagctgacataagagctggaa

SEQ ID NO: 4055 - DNA, 20 bp, Homo sapiens
cgacaggatatgctgaccac

SEQ ID NO: 4056 - DNA, 20 bp, Homo sapiens
agaagcagggtaggcactga

SEQ ID NO: 4057 - DNA, 382 bp, Homo sapiens
cgacaggatatgctgaccacagagcatctgaatgaagataaggttctctcattcaagaaacatttaataccttccctaggctcagccctgtgtgagatgcaggttgtggacttgaatggttcttcacctcagggagctcaaattgaaagccatatgccaaagaaagagtggagacagtgccaagatctcaatatgctgcaatgtgaatgggaggatgtggctaaaaagacaagacaatcctttgttgtgatggagcttttcatgagctctggagctcacgttttccctctctctagaaacacccaaatccttggctcaaaacgagacttcttccttgaggactttgaagtatagtactagcatcagtgcctaccctgcttct

SEQ ID NO: 4058 - DNA, 20 bp, Homo sapiens
tcagtgcctaccctgcttct

SEQ ID NO: 4059 - DNA, 20 bp, Homo sapiens
aggctggaagcactccctac

SEQ ID NO: 4060 - DNA, 254 bp, Homo sapiens
tcagtgcctaccctgcttcttgtaccttccccttaccaataatcacagacacacacacacacacacacacgcacgcacactcactctcacacacacacatactctcacacacacacgcacactctcacactcacgcaaactcacacccactctctcacacacacacactcacacagtgaattgcactacgtgaggactagagatgcaaatagggacagttgagagaatcccatcgtagggagtgcttccagcct

SEQ ID NO: 4061 - DNA, 20 bp, Homo sapiens
gcacccagtttctcacctct

SEQ ID NO: 4062 - DNA, 20 bp, Homo sapiens
ttctggatgtggctgaagtc

SEQ ID NO: 4063 - DNA, 162 bp, Homo sapiens
gcacccagtttctcacctctctttctttcttacacacatacacacaggtgcgctcacacgtgtgcgggcacacacacacacacacacacacacacacggttcttttctacagtgccagtaaatttcttacgaaactgttgctgacttcagccacatccagaa

SEQ ID NO: 4064 - DNA, 20 bp, Homo sapiens
aagacactgtgcccacacaa

SEQ ID NO: 4065 - DNA, 20 bp, Homo sapiens
ggcagagatgctcaggaaac

SEQ ID NO: 4066 - DNA, 302 bp, Homo sapiens
aagacactgtgcccacacaattcctactgcttgtaaactataaagcattataaacatatgatatctatgtctatatatatgcatatacatatagccatgtagctttgtattattcttttacaaaagaaagtgtgtgtgtgtgtgtgtgtgtgtgtgtgtgcgcgtgtgttcctagacacacatgccatatgcagtgagcaactacatcaatgggaatttgtccaggctcccttgcgttcatccccaagtaggaccacggcacacacatgagctgagtcaagagtttcctgagcatctctgcc

SEQ ID NO: 4067 - DNA, 20 bp, Homo sapiens
acactgtgcccacacaattc

SEQ ID NO: 4068 - DNA, 22 bp, Homo sapiens
gcatatggcatgtgtgtctagg

SEQ ID NO: 4069 - DNA, 189 bp, Homo sapiens
acactgtgcccacacaattcctactgcttgtaaactataaagcattataaacatatgatatctatgtctatatatatgcatatacatatagccatgtagctttgtattattcttttacaaaagaaagtgtgtgtgtgtgtgtgtgtgtgtgtgtgtgcgcgtgtgttcctagacacacatgccatatgc

SEQ ID NO: 4070 - DNA, 22 bp, Homo sapiens
gcaatttgctttgttccttaac

SEQ ID NO: 4071 - DNA, 20 bp, Homo sapiens
gggccctggagtgtattctt

SEQ ID NO: 4072 - DNA, 112 bp, Homo sapiens
gcaatttgctttgttccttaacaaggggtggtccttttttagttaaaactcagatgcacaccacacacacacacacacacacgaatggctggaagaatacactccagggccc

SEQ ID NO: 4073 - DNA, 20 bp, Homo sapiens
atgaggccaggattcaagtg

SEQ ID NO: 4074 - DNA, 20 bp, Homo sapiens
agctatccgttcagctcagg

SEQ ID NO: 4075 - DNA, 163 bp, Homo sapiens
atgaggccaggattcaagtgctttgaattgtgtgtgtgtgtgtgtgtgtgtgtgtgtgtgtgtgtgtgtgtgtgtgtatgtgtgtgagagagagagagagtgtgtgtgtgtgtatgtgcgtgtttattccacaaggaacatcccctgagctgaacggatagct

SEQ ID NO: 4076 - DNA, 20 bp, Homo sapiens
ggttggtcctgtgaactcgt

SEQ ID NO: 4077 - DNA, 20 bp, Homo sapiens
ggaggtggcttccaagtaga

SEQ ID NO: 4078 - DNA, 186 bp, Homo sapiens
ggttggtcctgtgaactcgtttagagtccaatttggaggtgggaggtagggagggagggcaagggttgaagctgaaggaggctattcaagaaactttgagcacaagtatagcttctttggggctcaagagaaggtgagtgactcagagcagactctcccctacccctctacttggaagccacctcc

SEQ ID NO: 4079 - DNA, 20 bp, Homo sapiens
acatgggaggcatgtcctta

SEQ ID NO: 4080 - DNA, 20 bp, Homo sapiens
tttcagctctcactgcatcc

SEQ ID NO: 4081 - DNA, 386 bp, Homo sapiens
acatgggaggcatgtccttagacacccctggaaatggccgggcacggtggctcacacttgtaaccccagcacttcgggaggctgaggcaggaggatcacttgaagccagcagttcaagaacagcctaggcaacatagtgagactgcatccctaccaaagcaacataaaaattagcctgggagtggtggcaggacacaattgtagtctcagctactctggaggatgaggtaggaggatgtcttgaggccaggagttcaagactgcattgagctatgattgcaccactatactccagcctagataacagagcaagattctaactctaaaaaagagagagagagagagagagaccctggaaacagctggggatgcagtgagagctgaaa

SEQ ID NO: 4082 - DNA, 20 bp, Homo sapiens
cacgggaatgtgcaataaga

SEQ ID NO: 4083 - DNA, 20 bp, Homo sapiens
aagagccttctgatgacctg

SEQ ID NO: 4084 - DNA, 214 bp, Homo sapiens
cacgggaatgtgcaataagaaccacaaggacagagacctgggcacgcattgcagaaacgggtggaggaagagtgagggaaagcgatggagaaggagcagacaagaaaaggaaaggaaaactctagactgagggtaaagtccacaatgctgaagagtggccaagcaggatgggcactgagggggatagcgtgtaacaggtcatcagaaggctctt

SEQ ID NO: 4085 - DNA, 21 bp, Homo sapiens
cccaccctcagatagcttaca

SEQ ID NO: 4086 - DNA, 27 bp, Homo sapiens
tccaactatatccatgtttctctcttt

SEQ ID NO: 4087 - DNA, 379 bp, Homo sapiens
cccaccctcagatagcttacaggagagtgagaccatcagtcagaatgggttgggctatgccatggtaacaaacaaccccacagtcttggggccttaacataacaaaggctcatcttgcaaatgcttcatatccaatgagggtctgctctgctccacaaaatcactcaggggctcagggcaatggagaatccactatcttgcagctgccctagtcattgcagcaggggaagaaacagctggaggtggtcaggtgctcatccagaagtaaattccaacacttctgcttacatctcactgggcagaatcagtcccatggctttactaactccaaggagccagcaggtgtatgccaaaagagagaaacatggatatagttgga

SEQ ID NO: 4088 - DNA, 27 bp, Homo sapiens
tccaacagctttcatatactacatatc

SEQ ID NO: 4089 - DNA, 20 bp, Homo sapiens
cccagaggcaaagagacatc

SEQ ID NO: 4090 - DNA, 141 bp, Homo sapiens
tccaacagctttcatatactacatatctataactagtctttaaggattaaaagccttaaaagtctctctctagtccccaccccaccatcctatacccagcctcagaatttggtcctcttttgatgtctctttgcctctggg

SEQ ID NO: 4091 - DNA, 20 bp, Homo sapiens
tggacagagcattagcacca

SEQ ID NO: 4092 - DNA, 20 bp, Homo sapiens
ttcagggacatgaggagaca

SEQ ID NO: 4093 - DNA, 358 bp, Homo sapiens
tggacagagcattagcaccatctctaccactcctctcttttgagagttggctttttcttttttaaattggcaagtaaagattgtatatatttatggtataaaacatgatgtttatatatatatacacacacacacacacattgtagaatggctaaatcaagctatttaacgtatgcattacctcacacacttattttttgtagtgagaacacttaagatctactctcttagcaattttcaaatatacaacatattgttattaactatgagagtttgctgtaaaaaaaaatctagtgattctttctaaaaacaaaggacttgtgtaccttagagatcattgtctcctcatgtccctgaa

SEQ ID NO: 4094 - DNA, 20 bp, Homo sapiens
acctttcctgcctagcctgt

SEQ ID NO: 4095 - DNA, 20 bp, Homo sapiens
ctttccagtgctggatgtga

SEQ ID NO: 4096 - DNA, 256 bp, Homo sapiens
acctttcctgcctagcctgtggcctcggtcttagaagtcatctctggagtccagcaagcctcacagatgctgggctagcttttcacatcctttgaggtggtttcaatgatctaagtaagaagaggcacacactgccagtttactgccaagcttcactcttagccctcctttaccctacagtgctctggggaggggaggagatggcaaagaccctccccagggaggtttctgaaaggtcacatccagcactggaaag

SEQ ID NO: 4097 - DNA, 20 bp, Homo sapiens
gcctccaggaacctgactct

SEQ ID NO: 4098 - DNA, 20 bp, Homo sapiens
atgtctgcctcttcctgctg

SEQ ID NO: 4099 - DNA, 150 bp, Homo sapiens
gcctccaggaacctgactctctcagtctcttactgtttcgctccgtgggtcaagtctctgcaaagccttcacgctgagccttgccttgcaggcagcctttgtgaggcagtcatcatggctcagctaactgcagcaggaagaggcagacat

SEQ ID NO: 4100 - DNA, 20 bp, Homo sapiens
tccaatgtgtgtgtccttcc

SEQ ID NO: 4101 - DNA, 20 bp, Homo sapiens
caagcacagtgcagagatga

SEQ ID NO: 4102 - DNA, 261 bp, Homo sapiens
tccaatgtgtgtgtccttccctatacacttcatttgcttatccccttattcattcaacaaaggagttccttttcttttcttttctttccttccttccttcctttctttcttttgacagggtttcaccatgttggccaggctgagcttaactcctgaccccaagtgatccacctgccaaggcctcccaaagtgctgggattacaggcgtgagccactgtgcctggccaaggagctcttattgtcatctctgcactgtgcttg

SEQ ID NO: 4103 - DNA, 25 bp, Homo sapiens
tccttattggtaccagtcacagtag

SEQ ID NO: 4104 - DNA, 23 bp, Homo sapiens
aaacatgtagtgcgaacaagaaa

SEQ ID NO: 4105 - DNA, 210 bp, Homo sapiens
tccttattggtaccagtcacagtaggccatgttatactacagtaataaatgtctccaaacctcagtaactttattcatttatttatttatttgtcctgtattgcgcaggctggtcttaaacttctggccttaatcaatcctcctacctcagcctcccaaagtgctgcgattacaggtgtgagatttttttcttgttcgcactacatgttt

SEQ ID NO: 4106 - DNA, 26 bp, Homo sapiens
aaataactggagtcctgtaggaatag

SEQ ID NO: 4107 - DNA, 20 bp, Homo sapiens
caaacctacaaaggcccaaa

SEQ ID NO: 4108 - DNA, 430 bp, Homo sapiens
aaataactggagtcctgtaggaatagaattattattattattattattaattattattttgagaaagagtcttgctctgtcgcccaggctgggagtgcagtggtgtgatctcagctcactgcaacctccacctcctcagttaaagcgattgtcatgtctcagcctctggagtagctgggattacaagcatagtacaacacgcctggctaatttttgtcattttttttagagacggtgtttcaccatgttggccaggctggtctcaaactcctagcctcaagtggtgtgtccaccttggcctcccaaagtgctgggattacaggtgtgagccactgcgcccagccagaatagaattattaaagattcaaagagatcattttatttttcagttattctttactatgttttactttgggcctttgtaggtttg

SEQ ID NO: 4109 - DNA, 20 bp, Homo sapiens
ggtgatgtcttgagcccact

SEQ ID NO: 4110 - DNA, 20 bp, Homo sapiens
tatgctgccatccagtcttc

SEQ ID NO: 4111 - DNA, 260 bp, Homo sapiens
ggtgatgtcttgagcccactgtgtcccaaggagatggactgaaaatcaggtaaattagcagatgaattggcaattacccccaaaagagagataaacagagttgaacagagtgcagcaggaaaggatagtggctcagatgtctctctcctctcatcttctctctttctctgtgtgtgcgcacacacacatgcacaggctcctttgtgtctcaagacaaacagcttcatccgcaccctgagggaagactggatggcagcata

SEQ ID NO: 4112 - DNA, 20 bp, Homo sapiens
gcagcaggaaaggatagtgg

SEQ ID NO: 4113 - DNA, 20 bp, Homo sapiens
gcggatgaagctgtttgtct

SEQ ID NO: 4114 - DNA, 120 bp, Homo sapiens
gcagcaggaaaggatagtggctcagatgtctctctcctctcatcttctctctttctctgtgtgtgcgcacacacacatgcacaggctcctttgtgtctcaagacaaacagcttcatccgc

SEQ ID NO: 4115 - DNA, 20 bp, Homo sapiens
ccctctcacctttgggtcta

SEQ ID NO: 4116 - DNA, 25 bp, Homo sapiens
tccacaattcaggtttcttactacc

SEQ ID NO: 4117 - DNA, 944 bp, Homo sapiens
  misc_feature 444: n = A,T,C or G
ccaggccagccctatcgcaactccttgcaccctcccagtgacccggtgactggggagacaatgacatcacctcagaatacataaacaaaagacaccctgttcttcaaagctctccaaggagaattacattttttagcccattcttgctgtaatatatgcataaatatcatctctcagagtttcctagattcagttcaaggacatagatgatttggtaggtatttgacttatagaagttttctgaagtcagagaataaattgaaacatgttttgctgagagtaggaaaacaactcaatttggaagaagagctgatttctcaggtaagtaattgtaagttatatcaacccctctcacctttgggtctagttttctcatctcctacacaaacctttggtgacaactttcatccttatcattcttttttttttttttttttttttttntgagacagggtcttgctgtgttgcccaggctggtcttgaactcctgggctcaaaccatcctcctgcctcagcctcccaaagtgctgggattacaagtgtaagccaacacgtctggcttcatcctataattcttaatatccacagaacactattcagaaaattcattggttaaaaaaatgtcaattcctcaaaacagcaaagtactatctccaagttccatgtaaagtgtgtgattaaacactttagtcagagcatttaaagaaagtgctaaagaaaggtagtaagaaacctgaattgtggaatagttattatcgtaactgcttgcatttattgagtgtttattatgtgcaagatattaggctgagttatttgcatggtttagctcattaaatcctcatagcacacatgtgaggtgttgtattagtctgttctcatgctgctaagaaagccatattactgggtaatttataaaggagagaggtttaactagctcacagttc

SEQ ID NO: 4118 - DNA, 20 bp, Homo sapiens
gagtgccaggaaatctggag

SEQ ID NO: 4119 - DNA, 20 bp, Homo sapiens
ctcagtgcagacgctctttg

SEQ ID NO: 4120 - DNA, 356 bp, Homo sapiens
gagtgccaggaaatctggagataagggctgtagtagcccaggaggtttcggtggaggaaggagaagttgaattggatgtcaaggattgtgttagaaagacaatttggattgtaccagggatggggtaggacagaaaaacaagcagagcaggctcccttgcttttgttgtctccatagaacagtagaaaaggtgaattagaccattttgtggttgacattaccaattaattttaaattcaatgcctgctttgtcgttgagcttaatcttaattatagcagatctcttcgcatttcttttctttgtgcagattgcacaggcaggggttttaagtgtatcaaagagcgtctgcactgag

SEQ ID NO: 4121 - DNA, 20 bp, Homo sapiens
tcttctggcaccttcctgat

SEQ ID NO: 4122 - DNA, 20 bp, Homo sapiens
aattgctcaggcgatgagac

SEQ ID NO: 4123 - DNA, 248 bp, Homo sapiens
tcttctggcaccttcctgatgttcctagcaagcaaatgtactttgccatgcactggtaaacaataaagattttactgaaggtctggtgtgatgacagaaatgtaatcaaggtcttccatggatatctgttctttcctgcaaagctctcttcctttgccagcagcctcacctcacctgtttacttttctctggttgaaggctttccttccagcatcaacagccctaaaagtctcatcgcctgagcaatt

SEQ ID NO: 4124 - DNA, 21 bp, Homo sapiens
ctctttgtttcatgcctgctc

SEQ ID NO: 4125 - DNA, 25 bp, Homo sapiens
ttgagttatatgctaagttccctga

SEQ ID NO: 4126 - DNA, 137 bp, Homo sapiens
ctctttgtttcatgcctgctcagccaaaaaacaaaacaaaaaacagaaacaacaaaaaaaaccagtattaaataaaaaactaacgacatatctttttcctccagcatacccctcagggaacttagcatataactcaa

SEQ ID NO: 4127 - DNA, 21 bp, Homo sapiens
ggaatgcgtctcaagactagg

SEQ ID NO: 4128 - DNA, 22 bp, Homo sapiens
tccaaagtgttcagatgtccag

SEQ ID NO: 4129 - DNA, 412 bp, Homo sapiens
ggaatgcgtctcaagactaggagataggaagatattcctttattttttcctgctcccctaagcatgctctattattattattattattttggatctcggctcactgcaaccttcacctcctgagttcaagcgattctcctgcctcagcctcctgagtagctgggactacaggcgtgcaccaccacacccagcaaatttttgttttagtagagatgaggtttcaccatgttggccaggatggtcttgatctcttgacctcatgatctgcccgcctcaggggattacaggtgtgagccaccgtgcctgatcaattattaaataaaatatagcgtttcctatttctcaataaatctattcggaattgagaaagaaagcagaagaagaactgacctggacatctgaacactttgga

SEQ ID NO: 4130 - DNA, 20 bp, Homo sapiens
agttgttgtgtgtgcctggt

SEQ ID NO: 4131 - DNA, 21 bp, Homo sapiens
agtgtgccaaccttgtttctt

SEQ ID NO: 4132 - DNA, 303 bp, Homo sapiens
agttgttgtgtgtgcctggtatatactagatgtatgactatacatggatattatttttgttgttttttatttgttttgttttttaaatagagatggggtctcactatgttgcccaggctggtctcaaactcctgggctcaagtgattctcctgccttggcctcccaaaatgctgggattacaggagggagccaccatgccaggcctttttgttgttttctttttatttttagaatcctgaagtcaagttctggaaaaaagaaaagtgaaagttcacagagataagaaacaaggttggcacact

SEQ ID NO: 4133 - DNA, 20 bp, Homo sapiens
ttcctctcctcctgctttcc

SEQ ID NO: 4134 - DNA, 20 bp, Homo sapiens
ggtgctgagacattcctggt

SEQ ID NO: 4135 - DNA, 136 bp, Homo sapiens
ttcctctcctcctgctttcccaccttgcaccaaaaaaaaaaaaaaaagaaagaaagaaagaaagaaaaggaaatcattttggaggagggggtcaggagaaggagactgttctttcaaccaggaatgtctcagcacc

SEQ ID NO: 4136 - DNA, 20 bp, Homo sapiens
ttcctctcctcctgctttcc

SEQ ID NO: 4137 - DNA, 20 bp, Homo sapiens
ggtgctgagacattcctggt

SEQ ID NO: 4138 - DNA, 136 bp, Homo sapiens; identical to SEQ ID NO: 4135

SEQ ID NO: 4139 - DNA, 20 bp, Homo sapiens
cccagaaacagccaccataa

SEQ ID NO: 4140 - DNA, 20 bp, Homo sapiens
acaccaccatgtccagctaa

SEQ ID NO: 4141 - DNA, 389 bp, Homo sapiens
cccagaaacagccaccataaccaatctcttttctacccttccagagttaattttttttaatatacaagcatatacaaatatccttttttaaaaaaccactagacccagatttactaatacgtaccttgtcaagttaaaaaatatatttactggccaggcctgagggctcacacctgtaatcccagcactttgggaggccaaagccagtggatcgcttgaggccaggagtttgagatcagcctgggcaacatagtgaaaccccatctctaccaaaaatacaaaaattagccaatctcataacccagaccagcctgggcaacatagagagacccccatctctacaacaacaacaacaacaacaacaacaaattagctggacatggtggtgt

SEQ ID NO: 4142 - DNA, 23 bp, Homo sapiens
ggattaagccaaatcacttgaga

SEQ ID NO: 4143 - DNA, 20 bp, Homo sapiens
tggatttgtcctgctctgtg

SEQ ID NO: 4144 - DNA, 359 bp, Homo sapiens
ggattaagccaaatcacttgagaaaggcttctaagaccctctcaatctgtatcgaacatggttttcagcctcatgctctttatccccagtccaagtcacttaatttttaataccttcccaactgttgcctccctccctcacccataaaaaacaaacaaacaaacaaaaacctttggtacaccctctgaactcccaccacgtaatgtacaaataccactcatacagcatctcccagtcctgtgtagcagactatttgtcacccagcaaacacccagggcccccaccccattctcctttactaatatgcagcagctctagcctggattagatgccagtacacacagagcaggacaaatcca

SEQ ID NO: 4145 - DNA, 20 bp, Homo sapiens
ttgagcacaggacttcagga

SEQ ID NO: 4146 - DNA, 21 bp, Homo sapiens
caggaagtaggtgtgggacat

SEQ ID NO: 4147 - DNA, 121 bp, Homo sapiens
  misc_feature 61: n = A,T,C or G
atggaaccatctcacacatgagagacatctctgacaacttattcataactgaatacttctngtaagtgatgtttctgaagcaccaatgaaaatgaagtcctgaagtcctgtgctcaatatg

SEQ ID NO: 4148 - DNA, 20 bp, Homo sapiens
tagctgggtgtggtggtaca

SEQ ID NO: 4149 - DNA, 20 bp, Homo sapiens
aatcccatcttggtgtttgc

SEQ ID NO: 4150 - DNA, 356 bp, Homo sapiens
tagctgggtgtggtggtacacgtgtagtcctagctacttgggaggctaaaggcaggaggatcacttgagcccaggaggtcgaggctgcagtgagccatgactgtgccactacactccagcctgggcaacagagtaagaccctatctcaaaaaacaaacaaacaaacaaacaaacaaacaacctcataaattcatgctgctccttccaagtcacattcaggacttacttaacttattccacattatgtgtataactcttttcatactgagaatcctagcaattagaacatctcataattgcccatctatttttatgttgctttgggcatttgaagaggcaaacaccaagatgggatt

SEQ ID NO: 4151 - DNA, 20 bp, Homo sapiens
tagctgggtgtggtggtaca

SEQ ID NO: 4152 - DNA, 20 bp, Homo sapiens
aatcccatcttggtgtttgc

SEQ ID NO: 4153 - DNA, 356 bp, Homo sapiens; identical to SEQ ID NO: 4150

SEQ ID NO: 4154 - DNA, 21 bp, Homo sapiens
gaaagtttgtgagggtgcatt

SEQ ID NO: 4155 - DNA, 21 bp, Homo sapiens
gcaaacataaatttggcaagc

SEQ ID NO: 4156 - DNA, 424 bp, Homo sapiens
gaaagtttgtgagggtgcattttaattaaaatgttatctaggcaggcgcggtggctcacgcctgtaatcctagcactttgggaggctgaggcgggcagatcacttgaggtcaggagttcgagaccagcctgaccaacatggagaaaccccatctctactaaaaatgcaaaaacaaacaaacaaacaaacaaacaaaaaaattagccaggcatggtgacaggcgtctgtaatccaagctactttggaggctgacgcagaagaatcacttgaatccaggaggcggaggttgcagtgagctgagtttgtactactgcaatccagcctgggcaacaagagtgaaactccttctcaaaaaaaaaaaaaaaattatctaaatgcatcacattagcaattataagctactgcttgccaaatttatgtttgc

SEQ ID NO: 4157 - DNA, 20 bp, Homo sapiens
ggactgatggtgatgttcca

SEQ ID NO: 4158 - DNA, 25 bp, Homo sapiens
caaagacccaaactaaatacatcca

SEQ ID NO: 4159 - DNA, 254 bp, Homo sapiens
ggactgatggtgatgttccattgtgtttctttgtgaaaatgtgatattaaacacaccagtaaatgaatctgaggccctccgtccttcccctcctccctccctcccttccttccttccacagatctagtcttcgctccttccttccttccttccttccttccttccttccttccttccttcctttccttcctccctccctccctctttccttatagttattttgggagtatggatgtatttagtttgggtctttg

SEQ ID NO: 4160 - DNA, 19 bp, Homo sapiens
cccttccttccttccacag

SEQ ID NO: 4161 - DNA, 25 bp, Homo sapiens
caaagacccaaactaaatacatcca

SEQ ID NO: 4162 - DNA, 152 bp, Homo sapiens
cccttccttccttccacagatctagtcttcgctccttccttccttccttccttccttccttccttccttccttccttcctttccttcctccctccctccctctttccttatagttattttgggagtatggatgtatttagtttgggtctttg

SEQ ID NO: 4163 - DNA, 20 bp, Homo sapiens
ttgcaaagcacctctctgat

SEQ ID NO: 4164 - DNA, 22 bp, Homo sapiens
catcacaactcaaccaagatcc

SEQ ID NO: 4165 - DNA, 265 bp, Homo sapiens
ttgcaaagcacctctctgatactttgtactgagattcatttaactcttcttttgtctctgtccttacactagtattttcaggcttctgcatttgctttgcttttgctttgaagtatgtgtgtaattttggtatagtgcccccatcttcattgtttaggaacttttaaaaaacactttctagtgagtttattgaagtcatagattgaagattgcttgagattagcagttttgtagacttcggggggatcttggttgagttgtgatg

SEQ ID NO: 4166 - DNA, 21 bp, Homo sapiens
cctgggtttgatattgattgc

SEQ ID NO: 4167 - DNA, 27 bp, Homo sapiens
acaaggattatttgatacataacaggt

SEQ ID NO: 4168 - DNA, 132 bp, Homo sapiens
cctgggtttgatattgattgctggagctttgaagagtcatataacccttctgcatcttcattcattcattcatttcttcattcacttaataagtcttcattgtttacctgttatgtatcaaataatccttgt

SEQ ID NO: 4169 - DNA, 20 bp, Homo sapiens
ttcttacaagccctcccaac

SEQ ID NO: 4170 - DNA, 25 bp, Homo sapiens
aaatccaagagaaagacactagaaa

SEQ ID NO: 4171 - DNA, 404 bp, Homo sapiens
ttcttacaagccctcccaacttttcaggtttttaaaaatttctctatctgtctgtctgtctgtctgtctatcgagagagatggggtctcagtctgttgcccaggctggaatgctgtggtgtaatcttggctcactgcaaccgctgcctcctgggctcaagtgatcctctcacttcagcttcctgagttgctgggactgtaggtgtgcgccactatgcccagctaattttttgtattttttggtagagacggacggggttttgccacgttacacaggctgctctccaactgctgagctcaagtgatccgccagcttcagtctcccaaactgctaggaggtgtcgtgagccactgtgcctggcatgccaacttttcaattttttctagtgtctttctcttggattt

SEQ ID NO: 4172 - DNA, 21 bp, Homo sapiens
ttagaagtgggaggtctcgaa

SEQ ID NO: 4173 - DNA, 20 bp, Homo sapiens
aggccaatcagtggcaatac

SEQ ID NO: 4174 - DNA, 362 bp, Homo sapiens
ttagaagtgggaggtctcgaactcctattcgtgatcacagacctcgtgatctgcctgccttggcctcctaaagtgctgggattataggcgtgagccaccgcgcctggttaatgtggtgaaaccccgtctctactaaacacacacacacacacacacacacacacacaattagctggtcatggtggtatgtgcctgtaatcccagctactcgggtggctgaggcaggagaattgcttgaacccaggaggtggaggttgtagtgagccgagatcgcaccactgcattccagcctgggcgacagagcaagactctttctcaagacaaaacaaaaaaaagtgggaggtattgccactgattggcct

SEQ ID NO: 4175 - DNA, 21 bp, Homo sapiens
ttagaagtgggaggtctcgaa

SEQ ID NO: 4176 - DNA, 20 bp, Homo sapiens
aggccaatcagtggcaatac

SEQ ID NO: 4177 - DNA, 362 bp, Homo sapiens; identical to SEQ ID NO: 4174

SEQ ID NO: 4178 - DNA, 20 bp, Homo sapiens
aacagaaggcagcctcaaag

SEQ ID NO: 4179 - DNA, 21 bp, Homo sapiens
aaacaaccatccatagctcca

SEQ ID NO: 4180 - DNA, 423 bp, Homo sapiens
aacagaaggcagcctcaaagtttatttttatttttatttttttagagacatagtcttgctttgtcacctaggctggagtgcagtggtgtgatctcagctcactgcatcctcgacctccctggctcaagtgatcctcccacctcagcctcccaagtagctgggactacaggcatgtatcaccatgcctggctaatttttgttttgttttgttttgttttggttgggacagggtttcaccctgttgtccaggctggtcttcagctcctgagctcaagtgatccacctgcctctgcctcccaaagtgctgggattacagacctgcaacaccgtgcctggccagagtcttcaaagcatattaaaatatctattattattttattataggcataattgagtgttttatggagctatggatggttgttt

SEQ ID NO: 4181 - DNA, 20 bp, Homo sapiens
aacagaaggcagcctcaaag

SEQ ID NO: 4182 - DNA, 18 bp, Homo sapiens
aggcacggtgttgcaggt

SEQ ID NO: 4183 - DNA, 334 bp, Homo sapiens
aacagaaggcagcctcaaagtttatttttatttttatttttttagagacatagtcttgctttgtcacctaggctggagtgcagtggtgtgatctcagctcactgcatcctcgacctccctggctcaagtgatcctcccacctcagcctcccaagtagctgggactacaggcatgtatcaccatgcctggctaatttttgttttgttttgttttgttttggttgggacagggtttcaccctgttgtccaggctggtcttcagctcctgagctcaagtgatccacctgcctctgcctcccaaagtgctgggattacagacctgcaacaccgtgcct

SEQ ID NO: 4184 - DNA, 20 bp, Homo sapiens
cggagggaatggaggtaagt

SEQ ID NO: 4185 - DNA, 21 bp, Homo sapiens
gcctgcacctgtagtcatagc

SEQ ID NO: 4186 - DNA, 215 bp, Homo sapiens
cggagggaatggaggtaagtgtcatccacttacttacattacattaagactttctttctttctttttttttttttcctttaagagactgggtctcactctgttgcccaggctggaatacagtggcctgatcattgctcactgcagcttcaaactcctgggcctgagcagtcttcccacctcaccctcccaagtagctatgactacaggtgcaggc

SEQ ID NO: 4187 - DNA, 21 bp, Homo sapiens
ttgccatattctttcaagtgc

SEQ ID NO: 4188 - DNA, 23 bp, Homo sapiens
tttctgggtgaagaaactagcag

SEQ ID NO: 4189 - DNA, 146 bp, Homo sapiens
ttgccatattctttcaagtgccttctttttgaaaataataataataatatagaatagaggtttctttgacctaggatttgaaagtcacagagttgccattttaatctaagtcatgtaaatatactgctagtttcttcacccagaaa

SEQ ID NO: 4190 - DNA, 20 bp, Homo sapiens
aacggaatgaaagggaaggt

SEQ ID NO: 4191 - DNA, 20 bp, Homo sapiens
ccctccttcattctcacagg

SEQ ID NO: 4192 - DNA, 150 bp, Homo sapiens
aacggaatgaaagggaaggtgatgaattttcagatgtcatgctgacttttttctttgctttctttctgagttgcaggtgtttaaaatccctagggaagagataaggtgatttatgttcaatacattggttcctgtgagaatgaaggaggg

SEQ ID NO: 4193 - DNA, 20 bp, Homo sapiens
ggagagggcccttaggaaat

SEQ ID NO: 4194 - DNA, 20 bp, Homo sapiens
catcaatcccaaagcctcac

SEQ ID NO: 4195 - DNA, 294 bp, Homo sapiens
ggagagggcccttaggaaatttttcttaaaaagagtttgtaatgattcataatttcatcagatctacaaaatacacttcaaatactttcaagaaagaagctttgatgtaataacagagaaaaatatgcgtaattttggcaagtgtgaaattgtcagccacagagcatgtgttgttttgttttgtgtttcactggaccggcagagtccagtttcctttttgagttgtacataggctcatactatgactgtttatgctgctaacataatatgatgagtgaggctttgggattgatg

SEQ ID NO: 4196 - DNA, 21 bp, Homo sapiens
tggtgcagtttctttctttgg

SEQ ID NO: 4197 - DNA, 22 bp, Homo sapiens
ccatatgtgcctgtatgtgtgc

SEQ ID NO: 4198 - DNA, 393 bp, Homo sapiens
tggtgcagtttctttctttggacaacagtatagccatcttctccagtccttcaagccaaggattttagttgactttggtcccatttttcctccatcatgacatttaattgttttccgtgtgttgtcagttttatctcttaagtctcccttacattcatttctttctttattcccactaccccagttcagatcccagtcatgtctcacctaaaaaattgcagcaatcttattaactagtatttctttatatatatataatagtatcttattactagtatttctttattcagtatttttcctctttcaggctgtctttcacaatactattgaaattttttggggggtgggtggggaataatgtgtgtgtgtgtgcacacatacaggcacatatgg

SEQ ID NO: 4199 - DNA, 21 bp, Homo sapiens
tggtgcagtttctttctttgg

SEQ ID NO: 4200 - DNA, 23 bp, Homo sapiens
aaccatatgtgcctgtatgtgtg

SEQ ID NO: 4201 - DNA, 395 bp, Homo sapiens
tggtgcagtttctttctttggacaacagtatagccatcttctccagtccttcaagccaaggattttagttgactttggtcccatttttcctccatcatgacatttaattgttttccgtgtgttgtcagttttatctcttaagtctcccttacattcatttctttctttattcccactaccccagttcagatcccagtcatgtctcacctaaaaaattgcagcaatcttattaactagtatttctttatatatatataatagtatcttattactagtatttctttattcagtatttttcctctttcaggctgtctttcacaatactattgaaattttttggggggtgggtggggaataatgtgtgtgtgtgtgcacacatacaggcacatatggtt

SEQ ID NO: 4202 - DNA, 22 bp, Homo sapiens
cagtttctttctttggacaaca

SEQ ID NO: 4203 - DNA, 21 bp, Homo sapiens
aagacagcctgaaagaggaaa

SEQ ID NO: 4204 - DNA, 310 bp, Homo sapiens
cagtttctttctttggacaacagtatagccatcttctccagtccttcaagccaaggattttagttgactttggtcccatttttcctccatcatgacatttaattgttttccgtgtgttgtcagttttatctcttaagtctcccttacattcatttctttctttattcccactaccccagttcagatcccagtcatgtctcacctaaaaaattgcagcaatcttattaactagtatttctttatatatatataatagtatcttattactagtatttctttattcagtatttttcctctttcaggctgtctt

SEQ ID NO: 4205 - DNA, 21 bp, Homo sapiens
cctctttcaggctgtctttca

SEQ ID NO: 4206 - DNA, 19 bp, Homo sapiens
ggcagtgagcagctaccaa

SEQ ID NO: 4207 - DNA, 145 bp, Homo sapiens
cctctttcaggctgtctttcacaatactattgaaattttttggggggtgggtggggaataatgtgtgtgtgtgtgcacacatacaggcacatatggttttgattgtgacaatttctaataaaccttttggtagctgctcactgcc

SEQ ID NO: 4208 - DNA, 20 bp, Homo sapiens
ggtattcacgtcagcagtgg

SEQ ID NO: 4209 - DNA, 23 bp, Homo sapiens
ttaacacaacactcattcctcct

SEQ ID NO: 4210 - DNA, 128 bp, Homo sapiens
ggtattcacgtcagcagtggctgccttgggtggtcaagcggcacagataaggctggagggatgttgagattgtatgtatgtatgtgttattgattcaaatatactaggaggaatgagtgttgtgttaa

SEQ ID NO: 4211 - DNA, 20 bp, Homo sapiens
cagataaggctggagggatg

SEQ ID NO: 4212 - DNA, 22 bp, Homo sapiens
gacctgaagcaaatacgacaaa

SEQ ID NO: 4213 - DNA, 265 bp, Homo sapiens
cagataaggctggagggatgttgagattgtatgtatgtatgtgttattgattcaaatatactaggaggaatgagtgttgtgttaacctgtataatatatacatatatacatatatatgttaatatgtatatatgttaatatatacatattaaacattactgtttttaattttaaaatatttcaaacaaactggaaaggataaggaataatataatgccttccagcttcatctgatcttaatgttttgtcgtatttgcttcaggtc

SEQ ID NO: 4214 - DNA, 23 bp, Homo sapiens
ctaggaggaatgagtgttgtgtt

SEQ ID NO: 4215 - DNA, 20 bp, Homo sapiens
gatgaagctggaaggcatta

SEQ ID NO: 4216 - DNA, 171 bp, Homo sapiens
ctaggaggaatgagtgttgtgttaacctgtataatatatacatatatacatatatatgttaatatgtatatatgttaatatatacatattaaacattactgtttttaattttaaaatatttcaaacaaactggaaaggataaggaataatataatgccttccagcttcatc

SEQ ID NO: 4217 - DNA, 20 bp, Homo sapiens
gctgtgcagcttgtctgagt

SEQ ID NO: 4218 - DNA, 20 bp, Homo sapiens
caagccaatccaatgcaaat

SEQ ID NO: 4219 - DNA, 377 bp, Homo sapiens
gctgtgcagcttgtctgagttgatggtctggtttgtagtctggttgccagtcccagtcttctgctaacacttcagtatgatcactgtatttcctcctgtaggccacctggtgccttgcctctgaaactactattttatatctattgtaggatgaagcttactttcccttgactgcacacacacacacatacccacccacccacccacccacatcacagtgaagagactgttttggtttcagttaaagtcagtaaattaatacttaaaatttatagtttcatgacttttgccagaaagctaaaaattctgttttgaaggttggcactcaggggtgtaactatagtcaactttttgtaaatttgcattggattggcttg

SEQ ID NO: 4220 - DNA, 20 bp, Homo sapiens
gctgtgcagcttgtctgagt

SEQ ID NO: 4221 - DNA, 20 bp, Homo sapiens
caagccaatccaatgcaaat

SEQ ID NO: 4222 - DNA, 377 bp, Homo sapiens; identical to SEQ ID NO: 4219

SEQ ID NO: 4223 - DNA, 20 bp, Homo sapiens
tcaaatctgggaggtggaag

SEQ ID NO: 4224 - DNA, 20 bp, Homo sapiens
aagggagggaaggaaggaag

SEQ ID NO: 4225 - DNA, 350 bp, Homo sapiens
tcaaatctgggaggtggaagaaagtaactaaaaagcttttaataaaaaatactcctcaccttgtacgattgtgtgttaaatgctttccatttttatctagtgagatttatttttgattttgcttctcacctgcttattgtatttagaggatgaatttacatgcctttgctttgatatactgtagacagttttaggctgcaacacgaagtttgcatgaattttgaattttcttttcttttctttctttctctttcccttccttccttccttccttccttcccctccctttcttctctccctccctcccttccctccattcccttccctccccttccttccttccctccctt

SEQ ID NO: 4226 - DNA, 20 bp, Homo sapiens
gcaacacgaagtttgcatga

SEQ ID NO: 4227 - DNA, 20 bp, Homo sapiens
ctgatcatgccgctacactc

SEQ ID NO: 4228 - DNA, 219 bp, Homo sapiens
gcaacacgaagtttgcatgaattttgaattttcttttcttttctttctttctctttcccttccttccttccttccttccttcccctccctttcttctctccctccctcccttccctccattcccttccctccccttccttccttccctcccttccctcctttccctccctcccagggtctcactttgttgcccagttgggagtgtagcggcatgatcag

SEQ ID NO: 4229 - DNA, 21 bp, Homo sapiens
gaaaggacaggttgacagcag

SEQ ID NO: 4230 - DNA, 20 bp, Homo sapiens
tccagaacccatcaaagtca

SEQ ID NO: 4231 - DNA, 265 bp, Homo sapiens
gaaaggacaggttgacagcagggggagatggagcttagcaggattttttgttttgttttgtttttttgtaggcgaagctaggcttaaaattatcttggattcaattatattccaccagtgatggaaagtcaacaatggaaagacttgatttccttttaaatatagtcttagaaaagatgaactaaggttacaaaatcatcagtgctgatcatgagatttttccaggtgatgtgagttgttattaatgactttgatgggttctgga

SEQ ID NO: 4232 - DNA, 27 bp, Homo sapiens
tttgtaggttggtctgaagttataaag

SEQ ID NO: 4233 - DNA, 20 bp, Homo sapiens
gaagcagtttggcacaaagg

SEQ ID NO: 4234 - DNA, 285 bp, Homo sapiens
tttgtaggttggtctgaagttataaagtaaaacaaaacaaaacttttcataattgacttagtaacagaattgttagcttatcaaagtcatttataaggtttacggggcttgctttttgggctgccttgtcttgaaactacccgaccatggtggccttcctgtgattatacatcttgatttgtctttcggtatgctgttttttaatatttataatcatcacattaatacattcttggctcattatttatttccttcatctgttttgcctttgtgccaaactgcttc

SEQ ID NO: 4235 - DNA, 22 bp, Homo sapiens
tggaatagtgattcccataggc

SEQ ID NO: 4236 - DNA, 20 bp, Homo sapiens
cccgcctcaacacatattta

SEQ ID NO: 4237 - DNA, 211 bp, Homo sapiens
tggaatagtgattcccataggcatgtgatggaccaactcatcaaaatcactttgttgttgttgttgttttttcttctatacatacagcttccagggtgagatctttgagtagcagtctgtggacagactgaatgaatagccaagcaagaatttgttgtttaagtgggaatggctgttggttggcttaaatttaaatatgtgttgaggcggg

SEQ ID NO: 4238 - DNA, 21 bp, Homo sapiens
gtatgcttattcaattcagta

SEQ ID NO: 4239 - DNA, 19 bp, Homo sapiens
ggtgacatgactcttcgcc

SEQ ID NO: 4240 - DNA, 269 bp, Homo sapiens
ggtgacatgactcttcgccttctaagtgtatacttccttcctaagtgctatttctctacttaagggatatctaaaacaatttctatactctaaaagaaagaaaaatctacacacacacacacacacacacacacacacacgcatgcacacacacacaaccttgtatatatatagttttatgtgtaccttattaaatccatcattcttttttaaattattttttgagcagcattattctagaatataaatactgaattgaataagcatac

SEQ ID NO: 4241 - DNA, 21 bp, Homo sapiens
tgacatgactcttcgccttct

SEQ ID NO: 4242 - DNA, 26 bp, Homo sapiens
gaatgatggatttaataaggtacaca

SEQ ID NO: 4243 - DNA, 203 bp, Homo sapiens
tgacatgactcttcgccttctaagtgtatacttccttcctaagtgctatttctctacttaagggatatctaaaacaatttctatactctaaaagaaagaaaaatctacacacacacacacacacacacacacacacacgcatgcacacacacacaaccttgtatatatatagttttatgtgtaccttattaaatccatcattc

SEQ ID NO: 4244 - DNA, 21 bp, Homo sapiens
tgacatgactcttcgccttct

SEQ ID NO: 4245 - DNA, 24 bp, Homo sapiens
ttctagaataatgctgctcaaaaa

SEQ ID NO: 4246 - DNA, 240 bp, Homo sapiens
tgacatgactcttcgccttctaagtgtatacttccttcctaagtgctatttctctacttaagggatatctaaaacaatttctatactctaaaagaaagaaaaatctacacacacacacacacacacacacacacacacgcatgcacacacacacaaccttgtatatatatagttttatgtgtaccttattaaatccatcattcttttttaaattattttttgagcagcattattctagaa

SEQ ID NO: 4247 - DNA, 20 bp, Homo sapiens
atagcccatgctgtgcactt

SEQ ID NO: 4248 - DNA, 19 bp, Homo sapiens
gggtgaaatgtgggtgatg

SEQ ID NO: 4249 - DNA, 171 bp, Homo sapiens
atagcccatgctgtgcacttttaatttgattctctaccttactttttagttaaacaaaacaaaacaaaacaaaacaaaactcgtcaccatagtaattctttagatgttagaatcagctaggtatgcttttttttctctcaaacttctttaatcatcacccacatttcaccc

SEQ ID NO: 4250 - DNA, 20 bp, Homo sapiens
ggaccaacctgccaaacata

SEQ ID NO: 4251 - DNA, 22 bp, Homo sapiens
cgaaagtcattgacagatcagg

SEQ ID NO: 4252 - DNA, 332 bp, Homo sapiens
ggaccaacctgccaaacataactagacccccatctcttaaaaaaaaaaaaaaaaagaaagaaaaagtattggcttctatcatttaccagcgttgtgatcttgggaaagtatatataaaatgcttaaaacaatgcctggcacatagtaaggacaaatgagtaaaaccataaaggggaaaagcagttagaggggtgtgtgtgtgtgtgtgtgtgtgtgtgtgtgtgtgtgtgtgtctgtctgtgtctgtctgtctgttacagggacttctcctataatcagttgcagtttttaaaaattgggtcttttatttcctgatctgtcaatgactttcg

SEQ ID NO: 4253 - DNA, 20 bp, Homo sapiens
gcctggcacatagtaaggac

SEQ ID NO: 4254 - DNA, 21 bp, Homo sapiens
ctgcaactgattataggagag

SEQ ID NO: 4255 - DNA, 153 bp, Homo sapiens
gcctggcacatagtaaggacaaatgagtaaaaccataaaggggaaaagcagttagaggggtgtgtgtgtgtgtgtgtgtgtgtgtgtgtgtgtgtgtgtgtctgtctgtgtctgtctgtctgttacagggacttctcctataatcagttgcag

SEQ ID NO: 4256 - DNA, 393 bp, Homo sapiens
ttaaaagtgaatactaatagttaccctgcatgtcaaatttgcataaacccaaacaaaactccagtttttcttctaaaagttctactctgcacttcatgatccacagtttgaaagaactgttcattgcaaaacttgtatttggaaaaagtgcctaccttcttaaaataacttacttcaagtgttctaatgttagcctctgcattttgaccacttcattattacatgttctgtcataaaaaggattacttctttctgaaaagtaatccaggacactaccactgttcaaaatagggatccaagagctgtcaacccaagaaattcccagcagattgtctatgggaaagaaaacaaaatgataaaggattagaaaaatagaaagaatccaatccaaca

SEQ ID NO: 4257 - DNA, 408 bp, Homo sapiens
aataatgggaaaggcttctattcttaacatgcttaagtttgtattttagataaataagacatacaggtatacgtatatacactcaaagataaaacaagtaattcataatttttgttgcaaatctattactccccttaccagaaaactatatttacacataagaatttgtcagatctcaaaaagcaagattggaaatcatagtgatcattgtatattttaatatagaatgaaaataaatttgactttgaggtatagttgaaatggaaataaatcagatgtgaaattagattgaataagttcaaagtggtaatgaaaataagccttgtatgtacaaattcaataaaagtatttgtctccctacaggcatagcaaacataggtggaaagattttacaaaggtattatgggg

SEQ ID NO: 4258 - DNA, 397 bp, Homo sapiens
ggatgtttaagcagaaacaatgaaagactagtagaagttagccaaatgaaaaggagaggtaagaaaatgcaagcagagggaagagcatgaaccaaagccaagaggcaagagagaagaagaaaatggaaaatgttcggaatagctggaacatcgaatatatgagaagactggatgagagtagattgtcagcagaaatcagaagtaagatcattgtaaactatgccaaggaattgagagcagtgggacactaaagaaagattttaaggaggcaagtgacaaggaggcaagatttcaatttagaaatgtgttatcataatctaagcctgaaaagatgatgacctatgctaagtaagtaacagtaacagtaaaaagaaatgaactaaaatgatagatattt

SEQ ID NO: 4259 - DNA, 379 bp, Homo sapiens
agatagaaattataaaaaaagaaccaaacaaattctgtagctgaaaaatataataacggtacaaaaaatagtagaaggatccaacagcagacttgatcaggcaaaagaaatagtcagcaaactcagagacagatcatgtaaagtcactgagtcagaggagcaagaagaaaaaaaatgaagaaaagtgaagacagcccaagggatttacaaaacactatcaagtagcctaatatatgctattattaaaatctcagaaaaagaatgagagaaagggacagagagcttatatgaacaaataatggctgaaaacttcctaaatctgaggaaaaagaagaacatacagactcaagagctcaattcagaaccctaaccagaataa

SEQ ID NO: 4260 - DNA, 361 bp, Homo sapiens
ggtgtatcttcgcctgtagactgggagtttcttgaggtcaggggagtgacttgcctatctttgcctcttagccttagcagatccccagtagacagctgacactcagaaccgaccaaaagaaggaaggaatgggacctcctgaggaagggcacagaactgtcctgtaaatggaaactagaccggacgcacgcctaagccgatgacccacagtaacaggtgttctccatctctgatgtctgtgattcatcctgcacagctgcgcgcacacagcacacgcatacacaggctcccagaatacggcgccccacacgctgtaccgcccgtcgcgttctggacgccccggcgaccacacacaccgaga

SEQ ID NO: 4261 - DNA, 361 bp, Homo sapiens
gatgacttgaggggacgcatgaagggtgtgcaggcaatttgcaaagggcaccaggttgtggtctcttctggctgggatttccttttggttggaagagatctggccagttgtgctgggcccctgggtgtagatttttgcgtatcttgttttccaggaaattcaaagaaataggtagggatcgttctgtttctacggaattttgaatgatcctgatacaatgattagaaaagatatcctgaccttcctggggagacataggaatctgatctttacagaggctacaaaggaagcatgtattggcctgttgatggactcttcttgacattgaacaagacacaggactcccctggggccttggaat

SEQ ID NO: 4262 - DNA, 374 bp, Homo sapiens
cactgcacgccagcctgggcgacagagcaggacaccatctcaaaaaaaaaaaagaatatacttgatgaggaaaataaaaggggagttctttgaaggctaaaatttccccaattctcttcagacatcttcttaagaactgtagcagaagtggggcttagtgaaaagggacctggactgcaagttctgtctctaactttctgtgtgccttggatcaaagaattttacctcttggaccatggtgttctgattttcagaaaattaagggttgaattctaagatctctaatctcctttccaggtcttaaagaaaaattctccacatcattctttctgaactgtgtggccattacatggaatagagaagttctatgtgtg

SEQ ID NO: 4263 - DNA, 377 bp, Homo sapiens
gcacacatgtgcagatttccagctctaggacttggccatctgatacctgtctgcccttgtgggtagtgggtgaaaatctactttagatagaaaatctactttaaattacgctgtagctttgttttgtaccacatagttgtatataggactcaagatggaaattttctccaattcatgtacacattgctgggcaaaccatatttgataagtgactttctaaagaactagtatttatgagaatccatttttgtcccagcactgtgagaagcatgtaatgtgcattaattatctcatttcatcatcataagcgttcccccaaagttcctatttaacatgggaagaataagacccagggtgatcatataactcgccctcgg

SEQ ID NO: 4264 - DNA, 384 bp, Homo sapiens
ttcttccactttactactatgtcattgcttcttgaaataaatttgaaagcaaatcaaataatttggcaaacttttgggaaaattttcccctaggaacccaatggccatttcctgggcccatctcacaaagcagtgactagcaaggtatattagtttcctaaggctgctgtaatagtcacacactgggtgacttaaaataacagaaattcattgtcttgtcattctagaggctagaagtgaaacatcaaggtgtcggcagggttggttccctctgagggctgtgaggaagaatctgttccaagcctctctcctaacttctggtagccccaggcactcactggctttgtagatagccgtcttcctagatcttattgcatcatcttt

SEQ ID NO: 4265 - DNA, 554 bp, Homo sapiens
gctggcagtggaggaatctgtacttgggaggggtggttggagatttgcagcttcaattcttgtcccccagatttgcctttctcttgtaagttcactggccacctctgctatcaccctgtttggctcaaggaaggctgtttctcctctagcacttcttcccacgctcttgatagaggcttgtcttcattctccacaatttggctgattccaggccactgcatttattcagccttttcagaagacccaaaggccagaaagttaataatatttctttcaatggagcctctagatatggttgtctgagagctcaggccctttgccatgcatcttccaccctgtacctcttctgctgccaagtgactacatctttgaatccaagtatatccacagcagccttttcagaagacccaaaggccagaaagttaataatatttctttcaatggagcctctagatatggttgtctgagagctcaggccctttgccatgcatcttccaccctgtacctcttctgctgccaagtgactacatctttgaatccaagtatatccacag

SEQ ID NO: 4266 - DNA, 381 bp, Homo sapiens
actgtgacttttcaaggcagagccaagaaagagagggagcgagaggggaatggcctatttcagaaagtttgggaagccatgcatgccaggttggagcagagaaccagagggaagggtaaaaaaggtgaagctggaaaagaaagaaaccatgacacagagacccttctggtccacgtagaagatctgggacttcattgtgaggcaagagtggatttggactgatgaagtgatggtgactcaggtgaccagagtggaggcggataagcaggaaaaacagatcaatgtaagtggcatccaggaggcagaggtgaccagcagcagggaatttctgcaatattttctctctgctgtccacatttgcaaggtagagccgttcatctg

SEQ ID NO: 4267 - DNA, 381 bp, Homo sapiens
ccctgagccacagggagccacagggctgggactagagtgatgacacgcctggaggatgactaaatggccttgaagaatgattgaaatttcgtgccctaggcacctccctctaatcccaaccctgctgagccacctcgcctccatttaaccactcaaatatctagtaggcattgaccaacggcaaagtatgttgcatacttctggagggagtacaaaaaaagagacaggaaaaaggcacctgtctgcttcttcaaagcaaataaaaacagagacttaggaggcaaaactggtgcttctgttcacaacccggctgggtggctgggggagaatgctgatgctctgttccttctttgtgcccagacttttccacactgacagaag

SEQ ID NO: 4268 - DNA, 382 bp, Homo sapiens
aggtgacagggagggaaagatgatggccaggggaaagagcatcgtataggctaggggattgaactgtggactgattcagtgtaaataaaaacaaattaacaggtagtagttcctgtcagttctgttggaagcagcccactccctcacttgttactccttcctccaaccctcaatcagagctacttacagccaggcaggatggggctttccccaaagcaattggccgtttgtccagtggcagacaatggtggctacagcctttgtgcttttaagagtgggctgggattgtggagactgcccaggggcttggctttgtcagaacttgtacaatcttcttttgatgaaattatctgaactcaacatctagcacatagaatgtgtt

SEQ ID NO: 4269 - DNA, 395 bp, Homo sapiens
ttaaactaatttcatcccagcctagtctcctgatgtctgtgctcgttatgctatgccatgttgcttcagtcaaacaagaaacacttactgagggcatattgtttgcccatcattgtgcaatatgctgtgggacatgggatgtcgtctcagtcttcaaggaaatggaagggttaagaaatgcatatgagattattaccaatgacaccgtttaatttatatgatgctttaaaattatcagagcactttcatgtatttttcgtgtgactagtgaaaaagacaatgttgtacaaaattaaaatatatacagatgcaataatgtgaatagttaggatttattaaatgcattatcttcagatctttacatgtataatctcatttctttcatgcagttactc

SEQ ID NO: 4270 - DNA, 391 bp, Homo sapiens
gtttctgacattcatgtaagtggaaaaatacagtattgtaacttttttatcttaatgcaatacaatttcattcttattaaacataatcatattgctttccatatttcctcatagcttcttgtgaacattttgatcttggttctgccaaccatatctgctaatttccctaactttatgccacctacagacttaataattccttctgtcctttatccaacagtaagacaaaaccaatgatagagtccagggtacttaactagaaacctcccttcaattttcaagcttaggaaatgagaagcattgtgaaagcgccagccaaatgggggcacctggagacaacacatgtggatggagagggctgtgttctgttaggatgcagtgaagagggagg

SEQ ID NO: 4271 - DNA, 382 bp, Homo sapiens
cgtctcacaagccaatgggaggagctgggaacccagcattagctggaaggtgctcaccttccctcttgatggttgactcagtgccgacacagactttagctgtcagcctgaaagcaatcagctcatcattgcagcctctttattgtctaaatttttctgaaaggcatgagaagccactggcctttcaacagggctaccgaggacctggggaagagaagggcagggaagcagagacagaggccaaacacaagtgcttctgccagcagggttcagagcacatctggcaaccccagctcccagccctgaagcaggcaccaggctacaaggacagacatagaccagggacaaggaaaaggaagggccagccccaaagcccttggga

SEQ ID NO: 4272 - DNA, 389 bp, Homo sapiens
tacatgtaagctccacataccgggctatggacaaagtatgtcttgtccaactttgttgtctcaacatgtaccacttagcagatgctcaataaatatttgtaggaagaagaagggcaggaagggggaagggcaagaagaaaaggcagtcaaaggtgaagcagcacccctgcccttctgagcccctttcagtatcatgctgactctcatcttcatgtggaaaacctgccatttgactgggccagttgcactgattatgttttaccggagaatgagccgagtggactaggaaaacactttaaaactcagttgtggggcagggtagggggtgggggcattggcatgaaaatgtttagatttcttcagtattgactttgttttgtcaaacaagt

SEQ ID NO: 4273 - DNA, 391 bp, Homo sapiens
accacttagcagatgctcaataaatatttgtaggaagaagaagggcaggaagggggaagggcaagaagaaaaggcagtcaaggtgaagcagcacccctgcccttctgagcccctttcagtatcatgctgactctcatcttcagtgtggaaaacctgccatttgactgggccagttgcactgattatgttttaccggagaatgagccgagtggactaggaaaacactttaaaactcagttgtggggcagggtagggggtgggggcattggcatgaaaatgtttagatttcttcagtattgactttgttttgtcaaacaagtcctcttgagggtagggaccatgtctagttcagtctccgctgtagctccagcaccttgcatagtgcgtagtg

SEQ ID NO: 4274 - DNA, 391 bp, Homo sapiens
ttacagagcaaccaaacaaacacatgtgtgaactttcacttcacctagacttaaaagccctaagggggaggaaaaatcccaaagaaagcttttctgtgaactaagtaaaacccatctccaattcctttccttaatcctctacaagccttagactataagatatctgggtttcgtgtggggagtgcaggatgagtagggagggaaatcagaaaagaaagtgagcaagttcatcacctcccttctttgctacaactgtgtatcaaaggcatgtggctcaatgtgacaaaaaggcaaaagcctgacctcaagtgcccagggaggagacacaagctacaataaggcttccaagctcaagagactgagagaaaagtgaggagaagctggaatgaag

SEQ ID NO: 4275 - DNA, 387 bp, Homo sapiens
cctcagtaatcaaggtaaatcatattgcaatgcagtattttttaaaaatcagagttattgaaaaattccacgatgaatacagtatcaaaattttaagtcaggctttgtctgggttggtgtccaggtgtgaaggatctcaggaacaggcagcactactatttctgaaacctggccttggacttcagtgagcgcagggcaaggaacaccacggccctggggccctcgctccccagggctccgcttgtgactactctgacctctgggttcagaatgcccagacgtctatccctcatgttccggtaggagaggcctgtctgtgcacccctggaatggtattctgctgtccaatcctgagacacctaactagttagacacctatctcgatag

SEQ ID NO: 4276 - DNA, 383 bp, Homo sapiens
gtcctgaccccaagtagctagatgggtaccctcaatacttgctggtttgccctttgccgagagtttccaaaaagaacaaggacatacttcatgaacctcttcattgcaactttactgtatttttcctaacatccccgtcccccctgttctcactgaggcagttcccctttccacctgtgggctcagataaataggtggggcacctggaagtgcagataggcagtgccaggtctatcaagccctatgaccccacactgggccaccttgctttcagtcttcctgctagcatgaaagggcttaggacacagaaaagctcctatctcgaaccaagccagattcccattcctgggtgttgggggacagcggaggaggaccaaaatcaa

SEQ ID NO: 4277 - DNA, 379 bp, Homo sapiens
gttcgagataggagcttttctgtgtcctaagccctttcatgctagcaggaagactgaaagcaaggtggcccagtgtggggtcatagggcttgatagacctggcactgcctatctgcacttccaggtgccccacctatttatctgagcccacaggtggaaaggggaactgcctcagtgagaacaggggggacggggatgttaggaaaaatacagtaaagttgcaatgaagaggttcatgaagtatgtccttgttctttttggaaactctcggcaaagggcaaaccagcaagtattgagggtacccatctagctacttggggtcaggacctcgtcagaccaggttcggatacaatcatctgctcatcccaggaatagtttc

SEQ ID NO: 4278 - DNA, 383 bp, Homo sapiens
taaacatgtgacgggaacagagctaggtatcagaagtccaaaggtgagtaatgtagggtttctgttcccaaagaggtcacatatctgagtataacaaaaaacaggagggcaggtcaagccaaacagttaaatacaactgttgttgacacttaaatctcattgaaagggtattactatgcctcccttttcctactggattagaggctgtttccaagtcagacttaggtcttccagggagaaagagatggtgacaggaaagagatggtgacaggaaagagtgtgtgtccccaggtgtcagatgtcgagggcagtcatatgcacggggatagcaatttgcctggactcatctccacgcctgaagaggcaggtatgagtcaggggtg

SEQ ID NO: 4279 - DNA, 391 bp, Homo sapiens
gacgctgctctccctctcctccatctccgagtgcaactccacacgctccctgctgcgctccgacagcgatgaaattgtcgtgtatgagatgccagtcagcccagtcgaggcccctcccctgagtccatgtacccacaactcccctggtcaatgtccgagtagagcgcttcaaacgagatcctaaccaatctctgactcccacccatgtcaccctcaccaccccctcgcagcccagcagtcaccggcggactccttctgatggggcccttaagccagagactctcctagccagcaggagcccctccagcaatgggttgagccccagtcctggagcaggtgagtcttcttcctcttttctctttcctttctttgtgcctcctcagggagtgaa

SEQ ID NO: 4280 - DNA, 392 bp, Homo sapiens
gagtctctggcttaagggccccatcagaaggagtccgccggtgactgctgggctgcgagggggtggtgagggtgacatgggtgggagtcagagattggttaggatctcgtttgaagcgctctactcggacattgaccaggggagttgtgggtacatggactcaggggaggggcctcgactgggctgactggcatctcatacacgacaatttcatcgctgtcggagcgcagcagggagcgtgtggagttgcactcggagatggaggagagggagagcagcgtcagggaggcagaggggtctcctagcaacagcatgggctcctccttcttgaaaagctttcgggatggggggctggtgctccgacgaggacggctggacctctgaaaaagacc

SEQ ID NO: 4281 - DNA, 398 bp, Homo sapiens
cccccaggactcaagcccacgagtgagaacacaagcacactccaggctctcacccctcttgtgccctgcccagaggagccatcatacatggcagtgtggctatggggtgagatctgaaaatagttctagcggccctggagttgtatacaactgtactaccagaggctgggttattctgcctgcccctgcttcagcatgagcctctaggcaagagagtcctgttaacttctgctctttcttctctttcctctgctttaaaaatggaagaagagccaggtataagcagaacaccctggcagaactttttacatttggttactgcttgggctacttgctactctgagtagaacgccttcaggggttggcaaactataactggtgggttaaaccctgcccgc

SEQ ID NO: 4282 - DNA, 389 bp, Homo sapiens
gccccgggtgaagaaacgcaagggcaagttcaggaagagccggctgaagctcaaggatggcaaccgcatcagcctcccttctggtcagtggccggggactggctgggaagtgggagcagggcaaagaactcgtgtggcagagggtttgagggagctccgggactgagcttggaaacatgacaccctggggctcaaactccagcctgttttaaatgggccattctgttcactggaaagactggcatgttgaaaatctaccctactccagggaaattgttgcatgtgagtgaacacagaatatgaagtgaggacaacccggcaaggtccaggctgctagaagcctggtggctcacaggggcacatctcactttaggcaaacctggagaagg

SEQ ID NO: 4283 - DNA, 390 bp, Homo sapiens
cgggagattgacatcctggaacgggagctcaacatcatcatccaccagctgtgccaggagaagccccgggtgaagaaacgcaagggcaagttcaggaagagccggctgaagctcaaggatggcaaccgcatcagcctcccttctggtcagtggccggggactggctgggaagtgggagcagggcaaagtaactcgtgtggcagagggtttgagggagtccgggactgagcttggaaacatgacaccctggggctcaaactccagcctgttttaaatgggccattctgttcactggaaagactggcatgttgaaaatctaccctactccagggaaattgttgcatgtgagtgaacacagaatatgaagtgaggacaacccggcaaggtcca

SEQ ID NO: 4284 - DNA, 389 bp, Homo sapiens
gagtagggtagattttcaacatgccagtctttccagtgaacagaatggcccatttaaaacaggctggagtttgagccccagggtgtcatgtttccaagctcagtcccggactccctcaaaccctctgccacacgagttactttgccctgctcccacttcccagccagtccccggccactgaccagaagggaggctgatgcggttgccatccttgagcttcagccggctcttcctgaacttgcccttgcgtttcttcacccggggcttctcctggcacagctggtggatgatgatgttgagctcccgttccaggatgtcaatctcccgctcggccagctcctgctcccgacgccgcagcagttcctcctggttcttctgctgcagtgcag

SEQ ID NO: 4285 - DNA, 388 bp, Homo sapiens
aaatacttttcataaaaacatgaaaaatgccacacaatttcagacccatgttattttttgcccatattctatttctgattctgatgtcaaaagacatgggaaggatgttctgataactatcctcaaggttgaagtatccctatatcaaattaaccttcttctagaaagtctattgtagaatcaagaaacatttccagaacttctcatatttccagctggcagggtgagacattccactgtgagaaaagaaaaaaggcctgtaatccaagcactgggattttgcccaactgcattcttctctggtttggacaattaagtagataccaagctggaaggtgggcatgctagaatcaagatggtcagtcagactcggtccagaggtccctgt

SEQ ID NO: 4286 - DNA, 318 bp, Homo sapiens
gtaaacaaaacaaaaaaaacaacaaaaaaacgaacgaaaagaaaaaaggcatgcattgaattggtagacctcactcacagggacctctggaccgagtctgactgaccatcttgattctagcatgcccaccttccagcttggtatctacttaattgtccaaaccagacgaagaatgcagttgggcaaaatcccagtgcttggattacaggccttttttcttttctcacagtggaatgtctcaccctgccagctggaaatatgagaagttctggaaatgtttcttgattctacaatagacttctagaagaaggttaattt

SEQ ID NO: 4287 - DNA, 386 bp, Homo sapiens
tcaaggttgaagtatccctatatcaaattaaccttcttctagaagtctattgtagaatcaagaaacatttccagaacttctcatatttccagctggcagggtgagacattccactgtgagaaaagaaaaaaggcctgtaatccaagcactgggattttgcccaactgcattcttcgtctggtttggacaattaagtagataccaagctggaaggtgggcatgctagaatcaagatggtcagtcagactcggtccagaggtccctgtgagtgaggtctaccaattcaatgcatgccttttttcttttcgttcgtttttttgttgttttttttgttttgtttaccttttctttggccctgagttggtcaaacatctcctgaatctcgt

SEQ ID NO: 4288 - DNA, 388 bp, Homo sapiens
gttgtaatggtggacagtttgctttacttcctgagccttatttgaggttacctaaattctgatctctgtttctggaagaagtaagaggtagttttctgggaagtgaggccatgtaatagcctaagtcttacatgtttgcttctgtccattcatgctttctgagtattcacatgttcttattcagactgctggaatcctgatccccactcacgaccatctttcacgaatatcctggaccagctaaccaccatagaggagtctggtttctttgaaatgcccaaggactccttccactgcctgcaggacaactggaaacacgagattcaggagatgtttgaccaactcagggccaaagaaaaggtaaacaaaacaaaaaaaacaacaaaaa

SEQ ID NO: 4289 - DNA, 394 bp, Homo sapiens
cgtttttttgttgttttttttgttttgtttaccttttctttggccctgagttggtcaaacatctcctgaatctcgtgtttccagttgtcctgcaggcagtggaaggagtccttgggcatttcaaagaaaccagactcctctatggtggttagctggtccaggatattcgtgaaagatggtcgtgagtggggatcaggattccagcagtctgaataagaacatgtgaatactcagaaagcatgaatggacagaagcaaacatgtaagacttaggctattacatggcctcacttcccagaaaactacctcttacttcttccagaaacagagatcagaatttaggtaacctcaaataaggctcaggaagtaaagcaaactgtccaccattacaacca

SEQ ID NO: 4290 - DNA, 387 bp, Homo sapiens
ttacagaagagttacaaggaatcactaacaccaacaactaaccctcatccagaaattaccatctatggctagtagacctgtggtttctccaaaagggcctgaaatgagattgtgtctgaggaggcttatgtagagctacagtgttggtgagaagctttgctgagggacactggcattcagagaagaagtctttctggggctgactaaactagttttcctctgccaacatcccgctttatgtttacaatggaaggtgggtgatataaatgaagacttggtattctgttggtgggaaaaaagactggagaaattcaagagaaatacaagtttacgtggatctgagctcagggaaaggcgggcagtagaagttgatgtgatttacctcag

SEQ ID NO: 4291 - DNA, 380 bp, Homo sapiens
ggcattcagagaagaagtctttctggggctgactaaactagttttcctctgccaacatcccgctttatgtttacaatggaaggtgggtgatataaatgaagacttggtattctgttggtgggaaaaaagactggagaaattcaagagaaatacaagtttacagtggatctgagctcagggaaaggcgggcagtagaagttgatgtgatttacctcaggtttagtcaacttagttgccctcccaaggttaaaaggtcaacaagtcctttgatgaccatttgcaagcagcctggaagaactcgttcagctaagtcactgcctctgagtacctccccgcaacacagacccaccagctcccacagtgctgccagtaatttccta

SEQ ID NO: 4292 - DNA, 431 bp, Homo sapiens
tggcatagggcaagcattccacagacacttcttgaatgagtcagtgagttacaagtcagtttgggaaacagctttgtaccaagttcctaggcatgccctggccctccctgagacaccctgctgggccctaggcacgcacggtgggctgatcattcagaagaggctgccttaagtgcaggaacaaggaccatacagatggtggcataactacaagcacagattgtcactacacacatatctagttctaatcatagctttatgtctgccacctgggtgaacttaggcatgtgacttcaattgtctgagcccagttacctcatctgtaaaatggaaatgatgatccctactttggggaattcttgtgaagactatagaagatgtataacatttaccacagaccctagcccttaagcatttgtaggtggtaacaa

SEQ ID NO: 4293 - DNA, 122 bp, Homo sapiens
gaagagttctgttctgtggtttccctgtgattaatgcagactctggtttcttctgtattcgttttccttgcctagtattgatcctccagaaggtggagaatggagacctgagcaacaagatt

SEQ ID NO: 4294 - DNA, 378 bp, Homo sapiens
cactgcctttggaaaacatggaggcccggatgacttcgggtgccatccaagcatacgtccctgccgcactcatcttggtggttcggtgccattcccgagccaggccaaaatcagtgatcttcagaatcttgttgctcaggtctccattctccaccttctggaggatcaatactaggcaaggaaaacgaatacagaagaaaccagagtctgcattaatcacagggaaaccacagaacagaactcttctgccatcctcctggcctctcctgtgggctccagcatttagctgccatggattgatggtcagagccatcatttcttaaacacctacagtgcatccatttttgtaccacccattttatagccactatctctaat

SEQ ID NO: 4295 - DNA, 376 bp, Homo sapiens
tattttagtttcttcatcagtaaaactgagatggcaatagtacctgccttgtaagttgttgtgaggattagagatagtggctataaaatgggtggtacaaaaatggatgcactgtaggtgtttaagaaatgatggctctgaccatcaatccatggcagctaaatgctggagctccacaggagaggccaggaggatggcagaagagttctgttctgtggtttccctgtgattaatgcagactctggtttcttctgtattcttttccttgcctagtattgatcctccagaaggtggagaatggagacctgagcaacaagattctgaagatcactgattttggcctggctcgggaatggcaccgaaccaccaagatgag

SEQ ID NO: 4296 - DNA, 378 bp, Homo sapiens
cttatgcaaagttttcagacaggctggttagttaacaagattgggatactagggtgatagtttgaaccaggccactcccaaacaactctggctggccataatgtgcatatgtgttctggggaacaagggaacaaatcagatgtattcatgtggaccagcactggagaaacaacccaaagcaccagcgcttcctcataatgtgcccacatccatgcctgccgcatgacttaacagcatgaggtgtggatttctgctgccttgttgggctggaggatagaaggagacatgatagggaactaatatatttataggcctcctgtaggcacagcacaattcatcagccttgaaaaatgactcctttaaccagccccaactttc

SEQ ID NO: 4297 - DNA, 381 bp, Homo sapiens
tcccaaacaactctggctggccataatgtgcatatgtgttctggggaacaagggaacaaatcagatgtattcatgtggaccagcactggagaaacaacccaaagcaccaggcttcctcataatgtgcccacatccatgcctgccgcatgacttaacagcatgaggtgtggactttctgctgccttgttgggctggaggatagaaggagacatgatagggaactaatatatttataggcctcctgtaggcacagcacaattcatcagccttgaaaaatgactcctttaaccagccccaactttctatgggaacttcactttcatctctttcttggaggccgtacccacttcccacatctcccatgctgctgagtgaaaggtt

SEQ ID NO: 4298 - DNA, 376 bp, Homo sapiens
cataatgtgcatatgtgttctggggaacaagggaacaaatcagatgtattcatgtggaccagcactggagaaacaacccaaagcaccaggcttcctcataatgtgcccacatccatgcctgccgcatgacttaacagcatgaggtgtggatttctgctgccttgttgggctggaggactagaaggagacatgatagggaactaatatatttataggcctcctgtaggcacagcacaattcatcagccttgaaaaatgactcctttaaccagccccaactttctatgggaacttcactttcatctctttcttggaggccgtacccacttcccacatctcccatgctgctgagtgaaaggttctcatgattaaaacag

SEQ ID NO: 4299 - DNA, 384 bp, Homo sapiens
agatcctgtttccactgttgtctgaaatactttggtcctagctggaaagcctggcagagtaacagtgttccattgtcgggctaaaagaaggaacactatcatgagcatcaggatgaccttaggcaagtcactcagcttctctagttcacaactgtaaggttccagtaagctctaatcatactctataagcaaaaaagaaagtcaagaatgaccagaatccaaaatctatcgctattttccctacccacagtccttttctccttcctcttatttattgtttttatttttagttttttggtttttcttggtactcactgattaaggcatcctccttcctcttggaccctgaaggttaacagaatgcagaaacaaaaacaaatttta

SEQ ID NO: 4300 - DNA, 376 bp, Homo sapiens
gacaaaaaaaaacacacaaacaaaacaagattttttggttggccacattggaattgccaccaaacacctgggctgctacatgcgaagtcctatactagggatgatgtgaggggagacagagatggggggagcaagggaagacgaagggatgaaaaacagcaacacctctgctgtcacagaattctattgggatttctatgttttcatagaaaaaaagttatcagagacaaaaagatacttaatcgcatttgcctctaagaagtaaacttagggtttgggagggaaggacagagacttttcttttttctctctctttttctggagacagacttttctttgtatttcaattttgtcctatttttacccatgtgtatcc

SEQ ID NO: 4301 - DNA, 387 bp, Homo sapiens
gacaaaattgaaatacaaagaaaagtctgtctccagaaaaagagagagaaaaaagaaaagtctctgtccttccctcccaaaccctaagtttacttcttagaggcaaatgcgattaagtatctttttgtctctgataactttttttctatgaaaacatagaaatcccaatagaattctgtgacagcagaggtgttgctgtttttcatcccttcgtcttcccttgctccccccatctctgtctcccctcacatcatccctagtataggacttcgcatgtagcagcccaggtgtttggtggcaattccaatgtggccaaccaaaaaatcttgttttgtttgtgtgtttttttttgtccctagttcctttctggatggactcaaaacactt

SEQ ID NO: 4302 - DNA, 376 bp, Homo sapiens
ggaaaaccagtcaggagctttggctagtgtgtggtccaggtatactccagggcttagaatgttagagcctgctgagctgaggccaatgggaagacaaaatctctatcatcctcacactggtgaaagcatgtcttcagcttcctgaccttgtgaactccaagagaaggttggagactgaggacaaggtgaagtgaacagaatttggagagggagatgctacatggacctccagttccaacaggagcagccaatccaacaattcaacaaaactggaacaggcaccatgaggagcgtgacaggcagtccccaagttgggaacaaagggagtactgaggttggacagaacagactgggagtagacccgacagcaccgggc

SEQ ID NO: 4303 - DNA, 373 bp, Homo sapiens
ccaacaggagcagccaatccaacaattcaacaaaactggaacaggcaccatgaggagcgtgacaggcagtccccaagttgggaacaaagggagtactgaggttggacagaacagactgggagtagacccgacagcaccgggcagtggtcgtgctccagcagctcctagcagccggcaactggctacagtggagacgtgggccagtgagttagccagggctggtgatcaggaaaagtgtgaagaggggaggaggcagaggcgtttgggattaataacgaatgtactgtcacaacaccacactccagcatccaaaacaggtggttgggctcagacaattaagatggatcaagggccaggggactctaacgaggat

SEQ ID NO: 4304 - DNA, 377 bp, Homo sapiens
aaagaagcccggaggattttagggcagctccatattgtcatctgggacccaggctcctatttttcactccctcatcccagtacttggcttccatcctcattgtcaccctgtggtccagatggctgctggactgccagttatgaggtccaagtcacaggcctgaaggatgaggggaaagcagaagcacagaaaaggtgccccatgtggctgagttggctcccattaatctcccggaagtccagcatggcgtatgtgcttgtgttaattggacagagtgtggtcgcctggccatcactcgctggagaggagacagggagatggaggcttttatgctgggtgtcattgaacccagctgagaatcaggatctgttatcaag

SEQ ID NO: 4305 - DNA, 382 bp, Homo sapiens
catcctggtgaattgggctgtgcagattgccagagggatgaactacttacatgatgaggcaattgttcccatcatccaccgcgaccttaagtccagcaacagtgagtatgaagagatggggctggaggggctcagagcaagttgcagttgtatcccacgacgtcagtaggagtggacttctaatggaaccttagagggcagtgaaactccttgcttaaacacattccatccttgaatggagatgtaggaggtgagatgagtgccaagaaagattggtttaggaagagaggaaagaggcgcctgaggagtttgggataattttgagcttttttttttagcagtctagagtggccttccctactatttttccacatatcagaat

SEQ ID NO: 4306 - DNA, 388 bp, Homo sapiens
tgattctgtatgttcccaattagagaagtagcagctgacctggtgggccagttctgctatgttctgggagttgttcacataggtccagctgagagcctcttctctcagcccttccaacaattctgcaagcacagaatttcctgtgctaaatctctttcttgctcaaaatagcttgagagtttctgagccccagaatgaatccagactgtattactaacttgtgcctgatgtcatctatatgaatgagaaaaatatgcctatgttataaagaaagattagaaactctcttggagaaatacatgttaagagtcttcctggtcatggagggaggaacattcatgtttttctagcagcttttacacatatgaaaagatgtgtgattacttaa

SEQ ID NO: 4307 - DNA, 391 bp, Homo sapiens
ctaaaaattaaaaaaacaaaaaaagcttttaaataaagtttgaagctaaattttcactttaagaagcaataatatgaaactaaagctgaacagtattgcttgacttaatgtcttctattcatggtccagaatgcaacgtcacaacacatagctcagaggagaagttcaaaagggtaactctggcgatgaagtgtcagtggctcaatttcattccaagtcttcggagacaaggtttgtcaatcgtcttcactttccgagtgacacaaactgatctggtagagcacatagacttcaatgaccgcccatgttcaccctctgatgaaccaaggcactgcactgaagttttatatttacatacttaatctccctcatgtaacttataagcaacttc

SEQ ID NO: 4308 - DNA, 389 bp, Homo sapiens
ttaaatgacaacagtctagtccctgagaaccttaactctataaaatgactaagggcgcaataatgattagaaaacattcagactcaaataataaaatactttctcctttaacgtggttttccagatttctactcaaggagaccttttaagtggctatgtcctttcctagttgaaggctgtgaatcttttgctcacagacatgagacatgagtctcctgacactgatgagacctttaagacagttgcctgttctctgggttactggatggagccctttgtgaagtcagtgggagccccagagagaagcctgcttggccggtggaacatcagggaaactctcttgtgctttgtgttttatgaaaagtaggggagattccaacctgaagcct

SEQ ID NO: 4309 - DNA, 382 bp, Homo sapiens
actccgtctcaaaaaaaaaaaagaaaagaaaaaaaaaacccaaactgcatccagagaaagcatgtagacgttcagagaggaatgaaaacaagaggctccctgtcattcaggccttggttcccatctgtccctgcctgctgtaaacaatatcccaccaagggccagcgttttgctaaagatagctctggtgggcttcaatcaccattaaacagttcctaaactaattctgctaaggctaatgtagagcagaagactcccttggcccatgtaacagctgtgtcatcattcatttactcatcccatcagtcaatgaatatcattgaatgccagctgtttacaagcttgtaagaagaggaagaaaaaacattggctgcagtcttta

SEQ ID NO: 4310 - DNA, 375 bp, Homo sapiens
caggtattgtttccaaagctcattcaaaaagtgctaggtaactaggccaggaaaggtttccagcctaacatactctgcccattccagcctttccaatatgataacctaagtgctggtgttcagacaaattgccatttcggtcaactcttgtcatcaacttaagttgccccttggggtaggcttaatgtccctttctgccttctggacttggttgggatcatcttaggcattggaagtatcaaataatgttaaacctcgagagatgtagcttgggtattaggtccctttcatttaagtagggtccttggcccccaaaacacgtttctccaacctctttggaagtcagctacataccagggattagaccaaacctta

SEQ ID NO: 4311 - DNA, 362 bp, Homo sapiens
ctttctacccaagaatcagcagtttaatagtttcctcattcatcatacctgtagagcactgcactaggagaaaaagaaataagatacaggatttcccaaatgaagaggataaaggccaaggcaaggctgcagcagcaatctcagctgtcctgtgccaaagatgacaggaccactgggagagaaaacaggcgaacagggacggacaagagagaagaggcagtaatcagtagtctgaagactgctggagaacaacttgacattgtgtatttaaggacagcctcaacaaagaaaccttattagccagagctatcaaaatagacccacttactaaatatgtttccaaactcttcactcccactcaa

SEQ ID NO: 4312 - DNA, 354 bp, Homo sapiens
tggaaccaatcccccatgactactgagggatgactgtactaaccactcctccaagtagcatggagcagctacttgggagcagtgagcagagaagcctgtaggaagtgtgtgtgaagtgtgagctctgctagcatccaaagaaagagaggaagcaaaactgactgacttcccggccctgcctcccctgccatgtcagatggaagcttggagactgacccttgaaagctccaactaaggaccaaaagagagtcaggtgtggagagcttagtgggccctaacatgcccaccacacacaagggcagtgccaggcagtgtgctgggccccaggagaagccggagaaaaatgaggcaata

SEQ ID NO: 4313 - DNA, 364 bp, Homo sapiens
ctaactttcttaaaaaaaaaaaaaaaaagaaagaagaatatatgtgaacctaaaagtaaacaggaacatctaccaagaggagcgggaatgagtgttggtaggtgggtaggagaccacagttgcccacctagccgtgatctctgcctaactgcaggtgttctacaggctccttccatagagatgacaggatgcatggaaggaagagcaccctggaaggaaaacacacagttccagaggcctcttcaaacagtaccagtaatgcatacatagaagtgcaaaggtgtgtacagatttatttgttccctatagatacagagccagcagtacttaagcacataaatccagcttttcatcaatgagaagc

SEQ ID NO: 4314 - DNA, 367 bp, Homo sapiens
agttgcccacctagcctgatctctgcctaactgcaggtgttctacaggctccttccatagagatgacaggatgcatggaaggaagagcaccctggaaggaaaacacacagttccagaggcctcttcaaacagtaccagtaatgcatacatagagagtgcaaaggtgtgtacagatttatttgttccctatagatacagagccagcagtacttaagcacataaatccagcttttcatcaatgagaagccaaatgagtctctcattcatttattactggatccacctgtctatataaagcccatcttcattttgcctgcttggtaaaaaaggaaactctcattggctcacctagctcttagactataag

SEQ ID NO: 4315 - DNA, 374 bp, Homo sapiens
gcaaaggcagaaaataactgacctttggtcaggacacagtccattttctgggttctggcctagacatgcagctcatgaaagattcagactttatttcttatagtctaagagctaggtgagccaatgagagttttccttttttaccaagcaggcaaaatgaagatgggctttatatagacaggtggatccagtaataaatgaatgagagactcatttggcttctcattgatgaaaagctggatttatgtgcttaagtactgctggctctgtatctatagggaacaaataaatctgtacacacctttgcacttctatgtatgcattactggtactgtttgaagaggcctctggaactgtgtgttttccttccaggg

SEQ ID NO: 4316 - DNA, 374 bp, Homo sapiens
taaatgttgagatagactggcttcctggcttacccaaagtgagccagggtaagctcacttacctttagccagaggtgagctaaaacctgaattgagcacatttcagttgcattgtataggcaatgtttttgctcattttttttccattgcataactttattccactcctctgagatgtttctccatgcccttttccatcattttttcatatctcccttgcttccatttttactctctccttctttcctccaataaaaagggcttcttggctcacacctccatcaacagacgcttggaaataacgcaccatggcaggttttcaaatattttttctttcctccctccagagagaaaaacaaaagggtaaagatggc

SEQ ID NO: 4317 - DNA, 375 bp, Homo sapiens
ggaagaggagaaaatggaaagttgtttaatgggtacagagtttcagttctgcaagatggaaaagttctggaaatctattgcaaacaatgtgcagacgcttaacactaatgaactgtacccttaaaaattatagacatggtacattttatgtgcgcttttttaaccacagttgaaaattttttttgaagaaggctgaagtttgctgattttctttgagacttactgcatcactcagtatcagaaaatctaaaaacagggggactgtgcaactgatgaaaccaaatccctcattatggtgtgtttctgtgttagacaccataatcccaaattgcacaggtctgcctttccttaaaggatgtaactgactggactaag

SEQ ID NO: 4318 - DNA, 380 bp, Homo sapiens
aggaacctgaccgtgctgggaccttgatactcatacttccagcctccagacatgtcagaaaataaatttttgttgtttaagccacccaatccataacatagactgggtattatgtcacccagtgccataacatgttatgctatggcagcctaagctgacttagatagtaaccatcattatgtgacaataaaaggagcatagtaaagagagcacataattctagaaggggtggaggttggagagaaattaagttgagaagaggagaacaagatgtcaggaaagtcttcccatatgagatacttctagcaattgagtctagtctagaggaacaggcagttattctctaaatggtctctaagaagagctgggggccttaaaaa

SEQ ID NO: 4319 - DNA, 381 bp, Homo sapiens
tctgatttctagcctattttccttccaatggcactgtcctaaggttgtacagcttagaaaatgttaacccagtattgttttctttacttgcatgtgagagaagagaagtcaaagtcaaaagcaggcagctggaaacctccaggggaagggattcccaggggttcctttatattcctttctccccaagcaaagcagagagagaagcagcacacataccctgtggattctgggtttggaaagcatagttgtgttgttcatctgggctgctataacaaaatactatacactgaatggctcataaaccacagaaatgtatttctcacagttctggtggcttggaagtccaaaatcaaggtgccagcagattttgtgtctggtgag

SEQ ID NO: 4320 - DNA, 378 bp, Homo sapiens
caaaagacatcagtggagaatgtggctcatcgtgcagccttcctgatagatctgactatggtagtgcacatactacatttaagccctgctgtgtatcaaagctgggtactcaaccctaacacatacccttcacttataatgaaactctctaatggactcttgcttatagggaaagcttgtataaccaactctcaatttttatgtgtatgtaaggtcaaaactgcagtgttctgttaatggtgataccactacaatgtctgtagatataggcaatagaaaactgaagcactcttatgacacaaatacagtgtaaacattcttgaaaaactgggaatttgctgcagcatcactcctagccactccccagaaatttggagg

SEQ ID NO: 4321 - DNA, 377 bp, Homo sapiens
tgtctctgaagtttctcagacttagcaaactgccaaagcacatggcatgtgttgatataaaaactttccaaatcaggctctgaactccaattagaatatagtacagaagcagagggaggaagggctggagagaccaggacaaaagttatcacacatttacactggttgtgattgggctagtgggcctattaacaaagctttctctctctttcctatattttctcagataaaaataccatgaatgtgttacttttaggatgaaaaactaaatacaaaagaccaattggatgtaaaatggtggagaggctggcccaagcaaactctcaataagttgtcaggttttcaaaatacaagtccaaaggaagagtggatagata

SEQ ID NO: 4322 - DNA, 368 bp, Homo sapiens
cactcatttattaatttctgcctctgtgcttttactgacaccatttgccttacttagaaaacattacccctccacctgcctgctaaaatccactacgtctactccaaacccattcttctattttttgaacagcctagagcactcacatgttccactcatttagcgtttaattatgtgctacttcaagatccctccatctaaactgtacattccttgagggcaaggcacttctcagcatgttccacagggcctagcagagaaagctgttagcatcaattaacactcagttcatatacattgattaaacaaagcacagaaaccaatggctttccaattagagattttaatctgttttttctttttttctt

SEQ ID NO: 4323 - DNA, 358 bp, Homo sapiens
caggttctgggatcaatcccagtcattttggagggcaactagagctttatattaacactctgggacttcaacataaggcaaccatgctcagtgtgaagtttggtcctagttctaggtattaggctcctgctttgtttgtaagtctcacttctgtccccccagatccagcctttgaatatttgttttgtcctgctgggtcctcaaacttgggcctccagtgagtatctcagtagctcaaggatctgagttctatttgttttcatcaattccctgtagaaacgaaagggcagacctagaaaaccccagcactgaagctggggccttgctataagcaacacactttctcaaggcttgccgt

SEQ ID NO: 4324 - DNA, 367 bp, Homo sapiens
caagaatgattccgtttttacagctataaaaagagatctacaagaccctattgtaatttggggtggcgtcacggttaatctttttcaaccctgtttagattggcccattaataaaaatggctgctagttacagcacatttaaaaactacaatcaccgcgtacaaatggtaacctgtccactccatacttccatgtcctgtgccgcttctattaacttgtctttggaagtagtaaattctcccagtctggacgtggctattttttctcacacacgggccaacacagttcttgctcaacttgggtgcgtttatgacttttcaacagtgtcatcagccgtacctaactcttccaggccttcagtatctca

SEQ ID NO: 4325 - DNA, 385 bp, Homo sapiens
taaaggaaaagaaaattagacctccaagaaagcagccatatttgtcaatttgtagaaaagtgtattaatttacaaaaaaagcagttgatttataaaatgttctgtcttttgtgacgtaaaggtggagtgttttctcccacttgaaaattactccaaatcataaaatcatttggtagattggaaaactaggaaagtttctattttttttctagcctttgaatacacagattcagtcaggtaatttgctttctctagctgactttactgagagttaaatctttcaacattttattaaagaattttcaaacatataggaaagttgagaaaattgtacccaccacctggattctgtgtttttaaatattgtgtctctatctgttttatt

SEQ ID NO: 4326 - DNA, 392 bp, Homo sapiens
tgagaataaagatagctaatcttaacaaaaatatgctttgttaccaaaaatcttactttactcccttaatgtcacagtattgaatattgaagaataccaggatgtgttattgaaaaatatacttaaaatactttaaatatacttgaagtgatcttttttcaatttctgatatatgaagattttcaaatgtataagaaaattgaaagaatgcttcatctagattccactattatgaacctttttgaaaaatcacatttgtttcaactatataaagatgcatggtatttatctgtacatactctgtctctcttacacacatatctgactcaattgacagtatgttgcaaacattatgacacatcaccccctaaatgcttcaggcaatattttta

1. Use of a MLK family kinase inhibitor for the manufacture of a medicament for treatment for asthma in an individual in need thereof, wherein the individual has at least one risk factor selected from the group consisting of: an at-risk haplotype for asthma; an at-risk haplotype in the map3k9 gene; a polymorphism in a map3k9 nucleic acid; dysregulation of map3k9 mRNA expression, dysregulation of a map3k9 mRNA isoform; increased MLK1 protein expression; increased MLK1 biochemical activity; and increased MKL1 protein isoform expression:

2. The use of claim 1, wherein the MLK family kinase inhibitor is a MLK1 inhibitor.

3. The use of claim 2, wherein the MLK1 inhibitor is CEP-1347 (Formula III) and its optically pure stereoisomers, mixtures of stereoisomers and salts.

4. The use of claim 2, wherein the MLK1 inhibitor is an indolocarbazole derivative and its optically pure stereoisomers, mixtures of stereoisomers and salts.

5. (canceled)

6. Use of a first nucleic acid molecule for diagnosing asthma or a susceptibility to asthma in a sample from an individual to be diagnosed, comprising detecting the presence or absence of a second nucleic acid molecule of at least one marker of an at-risk haplotype associated with the MAP3K9 gene selected from the group consisting of: haplotype 1, 2, 3, 4, 5, 6, 7, 8, 9 and 10 of Table 1 and combinations thereof in the sample by contact with the first nucleic acid, wherein the presence of one or more markers is indicative of asthma or a susceptibility to asthma.

7.-10. (canceled)

11. A method for the diagnosis and identification of susceptibility to asthma in an individual, comprising: screening in a sample from the individual to be diagnosed for at least one at-risk haplotype associated with MAP3K9 that is more frequently present in an individual susceptible to asthma compared to an individual who is not susceptible to asthma wherein the at-risk haplotype increases the risk significantly.

12. The method of claim 11, wherein the significant increase is at least about 20%.

13. The method of claim 11, wherein the significant increase is identified as an odds ratio of at least about 1.2.

14. (canceled)

15. (canceled)

16. A method of treatment for asthma in an individual, comprising administering a MLK family kinase inhibitor to the individual in need thereof, in a therapeutically effective amount, wherein the individual has at least one risk factor selected from the group consisting of: an at-risk haplotype for asthma; an at-risk haplotype in the MAP3K9 gene; a polymorphism in a MAP3K9 nucleic acid; dysregulation of MAP3K9 mRNA expression, dysregulation of a MAP3K9 mRNA isoform; increased MLK1 protein expression; increased MLK1 biochemical activity; and increased MKL1 protein isoform expression.

17. The method of claim 16, wherein the MLK family kinase inhibitor is selected from the group consisting of: compounds of Formula I, Table A and Table B, and their optically pure stereoisomers, mixtures of stereoisomers and salts.

18. The method of claim 16, wherein the MLK family kinase inhibitor is a MLK1 inhibitor.

19. The method of claim 18, wherein the MLK1 inhibitor is CEP-1347 (Formula III) and its optically pure stereoisomers, mixtures of stereoisomers and salts.

20. The method of claim 18, wherein the MLK1 inhibitor is an indolocarbazole derivative and its optically pure stereoisomers, mixtures of stereoisomers and salts.

21. The method of claim 16, wherein the MLK family kinase inhibitor is an inhibitor of a member of the JNK pathway.

22. The method of claim 21, wherein the MLK family kinase inhibitor is an inhibitor to a member of the MLK kinase pathway.

23. A method of assessing response to treatment with a MLK family kinase nucleic acid inhibitor by an individual in a target population, wherein the individual has at least one risk factor selected from the group consisting of: an at-risk haplotype for asthma; an at-risk halotype in the MAP3K9 gene; a polymorphism in a MAP3K9 nucleic acid; dysregulation of MAP3K9 mRNA expression, dysregulation of a MAP3K9 mRNA isoform; increased MLK1 protein expression; increased MLK1 biochemical activity; and increased MKL1 protein isoform expression, comprising:
a) assessing the level of a MLK1 protein in the individual before treatment with a MLK family kinase nucleic acid inhibitor;
b) assessing the level of the MLK1 protein in the individual during or after treatment with the nucleic acid inhibitor;
c) comparing the level of the MLK1 protein before treatment with the level of the MLK1 during or after treatment,
wherein a level of the MLK1 during or after treatment that is significantly lower than the level of the MLK1 before treatment, is indicative of efficacy of treatment with the nucleic acid inhibitor.

24. The method of claim 23, wherein the nucleic acid inhibitor is RNAi.

25. The method of claim 23, wherein the level of the MLK1 in steps a) and b) is assessed by measurement of ex vivo production of the MLK1 in a sample from the individual.

26. A method of treatment for asthma in an individual with an at-risk haplotype for asthma, comprising administering a MLK family kinase inhibitor to the individual in need thereof, in a therapeutically effective amount.

27. The method of claim 26, wherein the MLK family kinase inhibitor is selected from the group consisting of: compounds of Formula I, Table A and Table B, and their optically pure stereoisomers, mixtures of stereoisomers and salts.

28. The method of claim 26, wherein the MLK family kinase inhibitor is a MLK1 inhibitor.

29. The method of claim 28, wherein the MLK1 inhibitor is CEP-1347 (Formula III) and its optically pure stereoisomers, mixtures of stereoisomers and salts.

30. The method of claim 28, wherein the MLK1 inhibitor is an indolocarbazole derivative and its optically pure stereoisomers, mixtures of stereoisomers and salts.

31. The method of claim 26, wherein the MLK family kinase inhibitor is an inhibitor of a member of the JNK pathway.

32. The method of claim 31, wherein the MLK family kinase inhibitor is an inhibitor to a member of the MLK kinase pathway.

33.-115. (canceled)

116. The method of claim 16, wherein the MLK family kinase inhibitor is selected from the group consisting of: compounds of Formula IV, their optically pure stereoisomers, mixtures of stereoisomers and salts
wherein A represents O or S;
W represents O, NH, NR1;
R4 and R5 are independently selected from the group represented by hydrogen, halogen, cyano, nitro, C1-6-alk(en/yn)yl, C1-6-alk(en/yn)yloxy, C1-6-alk(en/yn)yloxy-C1-6-alk(en/yn)yl, C1-6-alk(en/yn)ylsulfanyl, hydroxy, hydroxy-C1-6-alk(en/yn)yl, halo-C1-6-alk(en/yn)yl, halo-C1-6-alk(en/yn)yloxy, C3-8-cycloalk(en)yl, C3-8-cycloalk(en)yl-C1-6-alk(en/yn)yl, acyl, C1-6-alk(en/yn)yloxycarbonyl, C1-6-alk(en/yn)ylsulfonyl, —NR7R8 and R7R8N—C1-6-alk(en/yn)yl-;
R3 represents hydrogen, halogen, C1-6-alk(en/yn)yl, C3-8-cycloalk(en/yn)yl, aryl, a heterocycle, hydroxy, hydroxy-C1-6-alk(en/yn)yl, C1-6-alk(en/yn)yloxy, C1-6-alk(en/yn)yloxy-C1-6-alk(en/yn)yl, C3-8-cycloalk(en/yn)oxy, C1-6-alk(en/yn)ylsulfanyl, acyl, R7R8N—C1-6-alk(en/yn)yl or —NR7R8;
or R3 represents a group of the formula —R9-Ar2
wherein R9 represents O, NH, NR1′, S, —CONR1′, —CO— or C1-6-alkyl, C2-6-alkenyl, which may optionally be substituted by OH, halogen, C1-6-alkoxy or C3-8-cycloalkyl;
R6 represents C1-6-alk(en/yn)yl, C3-8-cycloalk(en/yn)yl, C3-8-cycloalk(en)yl-C1-6-alk(en/yn)yl or Ar1;
Ar1 and Ar2 are independently selected from the group represented by aryl, a heterocycle or a carbocycle all of which may be substituted one or more times by halogen, cyano, nitro, C1-6-alk(en/yn)yl, C1-6-alk(en/yn)yloxy, C1-6-alk(en/yn)yloxy-C1-6-alk(en/yn)yl, C1-6-alk(en/yn)yloxy-C1-6-alk(en/yn)yloxy-C1-6-alk(en/yn)yl aryloxy-, aryl-C1-6-alk(en/yn) yloxy, halo-C1-6-alk(en/yn)yloxy, C1-6-alk(en/yn)yl-sulfanyl, hydroxy, hydroxy-C1-6-alk(en/yn)yl, halo-C1-6-alk(en/yn)yl, cyano-C1-6-alk(en/yn)yl, NR7R8, NR7R8-C1-6-alk(en/yn)yl, C3-8-cycloalk(en)yl, C3-8-cycloalk(en)yl-C1-6-alk(en/yn)yl, C1-6-alk(en/yn)ylsulfonyl, aryl, acyl, C1-6-alk(en/yn)yloxycarbonyl, C1-6-alk(en/yn)yl-CONR1′-C1-6-alk(en/yn)yl, C1-6-alk(en/yn)yl-CONR1′-, —CONR7R8 or R7R8NCO—C1-6-alk(en/yn)yl;
R7 and R8 are independently selected from the group represented by hydrogen and C1-6-alk(en/yn)yl which may be further substituted by hydroxy, halogen, C1-6-alkoxy, cyano, nitro, C3-8-cycloalk(en)yl, C3-8-cycloalk(en)yl-C1-6-alk(en/yn)yl, aryl or a heterocycle; or R7 and R8 together with the nitrogen to which they are attached form a 3-7-membered ring which optionally contains one or more further heteroatoms and may optionally be substituted by halogen, C1-6-alk(en/yn)yl, hydroxy, hydroxy-C1-6-alk(en/yn)yl or acyl;
the aryls may be further substituted by halogen, cyano, nitro, C1-6-alk(en/yn)yl, C1-6-alk(en/yn)yloxy, C1-6-alk(en/yn)ylsulfanyl, hydroxy, hydroxy-C1-6-alk(en/yn)yl, halo-C1-6-alk(en/yn)yl, halo-C1-6-alk(en/yn)yloxy, C3-8-cycloalk(en)yl, C3-8-cycloalk(en)yl-C1-6-alk(en/yn)yl, acyl, C1-6-alk(en/yn)yloxycarbonyl, C1-6-alk(en/yn)ylsulfonyl, or —NR7′R8′ wherein —NR7—R8′ is as defined for —NR7R8 above provided that any aryl substituent on —NR7′R8′ is not further substituted; and R1 and R140 are independently selected from the group represented by C1-6-alk(en/yn)yl, C3-8-cycloalk(en)yl, aryl, hydroxy-C1-6-alk(en/yn)yl, C3-8-cycloalk(en)yl-C1-6-alk(en/yn)yl and acyl;
or a pharmaceutically acceptable salt thereof.

117.-148. (canceled)
